United States Patent Application Publication US 2022/0267394 A1 - sequence listing, part 7

SEQ ID NO: 79891 - protein, 40 aa, Artificial Sequence; identical to SEQ ID NO: 8560
  GFR-binding peptide
  MOD_RES (5), (6), (39): Xaa is C or S
  MOD_RES (20), (21), (22), (23), (24): Xaa is A or G
  MOD_RES (25), (26), (27), (28): Xaa is A or G or is absent

SEQ ID NO: 79892 - protein, 36 aa, Artificial Sequence; identical to SEQ ID NO: 8561
  GFR-binding peptide
  MOD_RES (2), (3), (34), (36): Xaa is C or S

SEQ ID NO: 79893 - protein, 37 aa, Artificial Sequence; identical to SEQ ID NO: 8563
  GFR-binding peptide
  MOD_RES (34), (36): Xaa is C or S
  MOD_RES (14), (15), (16), (17), (18): Xaa is A or G
  MOD_RES (19), (20), (21), (22): Xaa is A or G or is absent

SEQ ID NO: 79894 - protein, 36 aa, Artificial Sequence; identical to SEQ ID NO: 8564
  GFR-binding peptide
  MOD_RES (2), (3), (34), (36): Xaa is C or S

SEQ ID NO: 79895 - protein, 41 aa, Artificial Sequence; identical to SEQ ID NO: 6772
  GFR-binding peptide
  MOD_RES (6), (7), (40): Xaa is C or S

SEQ ID NO: 79896 - protein, 36 aa, Artificial Sequence; identical to SEQ ID NO: 8565
  GFR-binding peptide
  MOD_RES (1), (34), (36): Xaa is C or S

SEQ ID NO: 79897 - protein, 37 aa, Artificial Sequence
  GFR-binding peptide
  MOD_RES (1), (2), (34), (36): Xaa is C or S
XXTPTKMSAISMLYLNDKQQIILKNYQGMVVDRXGXS

SEQ ID NO: 79898 - protein, 39 aa, Artificial Sequence; identical to SEQ ID NO: 6773
  GFR-binding peptide
  MOD_RES (1), (2), (36), (38): Xaa is C or S
  MOD_RES (16), (17), (18), (19), (20): Xaa is A or G
  MOD_RES (21), (22), (23), (24): Xaa is A or G or is absent

SEQ ID NO: 79899 - protein, 41 aa, Artificial Sequence; identical to SEQ ID NO: 6774
  GFR-binding peptide
  MOD_RES (2), (3), (38), (40): Xaa is C or S
  MOD_RES (17), (18), (19), (20), (21): Xaa is A or G
  MOD_RES (22), (23), (24), (25): Xaa is A or G or is absent

SEQ ID NO: 79900 - protein, 39 aa, Artificial Sequence; identical to SEQ ID NO: 27951
  GFR-binding peptide
  MOD_RES (5), (6): Xaa is C or S
  MOD_RES (20), (21), (22), (23), (24): Xaa is A or G
  MOD_RES (25), (26), (27), (28): Xaa is A or G or is absent

SEQ ID NO: 79901 - protein, 40 aa, Artificial Sequence; identical to SEQ ID NO: 8566
  GFR-binding peptide
  MOD_RES (6), (7), (39): Xaa is C or S

SEQ ID NO: 79902 - protein, 42 aa, Artificial Sequence
  GFR-binding peptide
  MOD_RES (6), (7), (41): Xaa is C or S
  MOD_RES (21), (22), (23), (24), (25): Xaa is A or G
  MOD_RES (26), (27), (28), (29): Xaa is A or G or is absent
HVPKPXXAPTKLSAISVLYLXXXXXXXXXLKNYQNMVVRSXG

SEQ ID NO: 79903 - protein, 37 aa, Artificial Sequence
  GFR-binding peptide
  MOD_RES (4), (5), (37): Xaa is C or S
SKAXXVPTKLSAISILYLDKGVVTYLKNYQGMAVSEX

SEQ ID NO: 79904 - protein, 40 aa, Artificial Sequence; identical to SEQ ID NO: 6775
  GFR-binding peptide
  MOD_RES (3), (4), (37), (39): Xaa is C or S
  MOD_RES (18), (19), (20), (21), (22): Xaa is A or G
  MOD_RES (23), (24), (25), (26): Xaa is A or G or is absent

SEQ ID NO: 79905 - protein, 39 aa, Artificial Sequence
  GFR-binding peptide
  MOD_RES (1), (2), (36), (38): Xaa is C or S
  MOD_RES (16), (17), (18), (19), (20): Xaa is A or G
  MOD_RES (21), (22), (23), (24): Xaa is A or G or is absent
XXVPEKMSAISILYLXXXXXXXXXLKNYQNMTVESXAXR

SEQ ID NO: 79906 - protein, 42 aa, Artificial Sequence; identical to SEQ ID NO: 6778
  GFR-binding peptide
  MOD_RES (5), (6), (41): Xaa is C or S
  MOD_RES (20), (21), (22), (23), (24): Xaa is A or G
  MOD_RES (25), (26), (27), (28): Xaa is A or G or is absent

SEQ ID NO: 79907 - protein, 36 aa, Artificial Sequence; identical to SEQ ID NO: 27958
  GFR-binding peptide
  MOD_RES (1), (2), (34), (36): Xaa is C or S

SEQ ID NO: 79908 - protein, 35 aa, Artificial Sequence; identical to SEQ ID NO: 57901
  GFR-binding peptide
  MOD_RES (1), (35): Xaa is C or S
  MOD_RES (15), (16), (17), (18), (19): Xaa is A or G
  MOD_RES (20), (21), (22), (23): Xaa is A or G or is absent

SEQ ID NO: 79909 - protein, 40 aa, Artificial Sequence; identical to SEQ ID NO: 6780
  GFR-binding peptide
  MOD_RES (6), (7), (38), (40): Xaa is C or S

SEQ ID NO: 79910 - protein, 41 aa, Artificial Sequence; identical to SEQ ID NO: 14130
  GFR-binding peptide
  MOD_RES (4), (5), (39), (41): Xaa is C or S
  MOD_RES (19), (20), (21), (22), (23): Xaa is A or G
  MOD_RES (24), (25), (26), (27): Xaa is A or G or is absent

SEQ ID NO: 79911 - protein, 38 aa, Artificial Sequence
  GFR-binding peptide
  MOD_RES (5), (6), (38): Xaa is C or S
ASKAXXVPTKLSAISILYLDKGVVTYLKNYQGMAVSEX

SEQ ID NO: 79912 - protein, 40 aa, Artificial Sequence; identical to SEQ ID NO: 6781
  GFR-binding peptide
  MOD_RES (2), (3), (38), (40): Xaa is C or S
  MOD_RES (17), (18), (19), (20), (21): Xaa is A or G
  MOD_RES (22), (23), (24), (25): Xaa is A or G or is absent

SEQ ID NO: 79913 - protein, 34 aa, Artificial Sequence; identical to SEQ ID NO: 70845
  GFR-binding peptide
  MOD_RES (3), (4): Xaa is C or S

SEQ ID NO: 79914 - protein, 41 aa, Artificial Sequence; identical to SEQ ID NO: 29883
  GFR-binding peptide
  MOD_RES (5), (6), (38), (40): Xaa is C or S

SEQ ID NO: 79915 - protein, 37 aa, Artificial Sequence; identical to SEQ ID NO: 8567
  GFR-binding peptide
  MOD_RES (1), (2), (36): Xaa is C or S
  MOD_RES (16), (17), (18), (19), (20): Xaa is A or G
  MOD_RES (21), (22), (23), (24): Xaa is A or G or is absent

SEQ ID NO: 79916 - protein, 37 aa, Artificial Sequence; identical to SEQ ID NO: 6782
  GFR-binding peptide
  MOD_RES (34), (36): Xaa is C or S
  MOD_RES (14), (15), (16), (17), (18): Xaa is A or G
  MOD_RES (19), (20), (21), (22): Xaa is A or G or is absent

SEQ ID NO: 79917 - protein, 35 aa, Artificial Sequence; identical to SEQ ID NO: 6783
  GFR-binding peptide
  MOD_RES (1), (2), (35): Xaa is C or S

SEQ ID NO: 79918 - protein, 37 aa, Artificial Sequence; identical to SEQ ID NO: 6786
  GFR-binding peptide
  MOD_RES (1), (34), (36): Xaa is C or S
  MOD_RES (15), (16), (17), (18), (19): Xaa is A or G
  MOD_RES (20), (21), (22), (23): Xaa is A or G or is absent

SEQ ID NO: 79919 - protein, 36 aa, Artificial Sequence; identical to SEQ ID NO: 6787
  GFR-binding peptide
  MOD_RES (2), (3): Xaa is C or S
  MOD_RES (17), (18), (19), (20), (21): Xaa is A or G
  MOD_RES (22), (23), (24), (25): Xaa is A or G or is absent

SEQ ID NO: 79920 - protein, 35 aa, Artificial Sequence; identical to SEQ ID NO: 8570
  GFR-binding peptide
  MOD_RES (33), (35): Xaa is C or S
  MOD_RES (14), (15), (16), (17), (18): Xaa is A or G
  MOD_RES (19), (20), (21), (22): Xaa is A or G or is absent

SEQ ID NO: 79921 - protein, 39 aa, Artificial Sequence
  GFR-binding peptide
  MOD_RES (5), (6): Xaa is C or S
  MOD_RES (20), (21), (22), (23), (24): Xaa is A or G
  MOD_RES (25), (26), (27), (28): Xaa is A or G or is absent
SAGPXXTPTKMSAISMLYLXXXXXXXXXLKNYQGMVVDR

SEQ ID NO: 79922 - protein, 37 aa, Artificial Sequence; identical to SEQ ID NO: 6789
  GFR-binding peptide
  MOD_RES (4), (5), (37): Xaa is C or S

SEQ ID NO: 79923 - protein, 35 aa, Artificial Sequence; identical to SEQ ID NO: 6794
  GFR-binding peptide
  MOD_RES (3), (4): Xaa is C or S

SEQ ID NO: 79924 - protein, 41 aa, Artificial Sequence; identical to SEQ ID NO: 8571
  GFR-binding peptide
  MOD_RES (6), (7), (39), (41): Xaa is C or S

SEQ ID NO: 79925 - protein, 32 aa, Artificial Sequence; identical to SEQ ID NO: 14144
  GFR-binding peptide
  MOD_RES (14), (15), (16), (17), (18): Xaa is A or G
  MOD_RES (19), (20), (21), (22): Xaa is A or G or is absent

SEQ ID NO: 79926 - protein, 33 aa, Artificial Sequence; identical to SEQ ID NO: 69205
  GFR-binding peptide
  MOD_RES (32), (32): Xaa is C or S

SEQ ID NO: 79927 - protein, 40 aa, Artificial Sequence; identical to SEQ ID NO: 8573
  GFR-binding peptide
  MOD_RES (4), (5), (37), (39): Xaa is C or S

SEQ ID NO: 79928 - protein, 37 aa, Artificial Sequence; identical to SEQ ID NO: 8574
  GFR-binding peptide
  MOD_RES (5), (6), (37): Xaa is C or S

SEQ ID NO: 79929 - protein, 37 aa, Artificial Sequence; identical to SEQ ID NO: 8575
  GFR-binding peptide
  MOD_RES (2), (3), (34), (36): Xaa is C or S

SEQ ID NO: 79930 - protein, 31 aa, Artificial Sequence; identical to SEQ ID NO: 8576
  GFR-binding peptide
  MOD_RES (1), (1): Xaa is C or S

SEQ ID NO: 79931 - protein, 34 aa, Artificial Sequence; identical to SEQ ID NO: 57917
  GFR-binding peptide
  MOD_RES (33), (33): Xaa is C or S
  MOD_RES (14), (15), (16), (17), (18): Xaa is A or G
  MOD_RES (19), (20), (21), (22): Xaa is A or G or is absent

SEQ ID NO: 79932 - protein, 34 aa, Artificial Sequence; identical to SEQ ID NO: 6797
  GFR-binding peptide
  MOD_RES (34), (34): Xaa is C or S
  MOD_RES (14), (15), (16), (17), (18): Xaa is A or G
  MOD_RES (19), (20), (21), (22): Xaa is A or G or is absent

SEQ ID NO: 79933 - protein, 39 aa, Artificial Sequence; identical to SEQ ID NO: 8580
  GFR-binding peptide
  MOD_RES (3), (4), (36), (38): Xaa is C or S

SEQ ID NO: 79934 - protein, 32 aa, Artificial Sequence
  GFR-binding peptide
  MOD_RES (1), (2): Xaa is C or S
XXAPVKTSAISMLYLDNGRVLLLKNYQMIVEE

SEQ ID NO: 79935 - protein, 38 aa, Artificial Sequence; identical to SEQ ID NO: 6801
  GFR-binding peptide
  MOD_RES (4), (5), (38): Xaa is C or S
  MOD_RES (19), (20), (21), (22), (23): Xaa is A or G
  MOD_RES (24), (25), (26), (27): Xaa is A or G or is absent

SEQ ID NO: 79936 - protein, 31 aa, Artificial Sequence; identical to SEQ ID NO: 6805
  GFR-binding peptide
  MOD_RES (1), (1): Xaa is C or S

SEQ ID NO: 79937 - protein, 34 aa, Artificial Sequence; identical to SEQ ID NO: 8581
  GFR-binding peptide
  MOD_RES (1), (33): Xaa is C or S

SEQ ID NO: 79938 - protein, 38 aa, Artificial Sequence
  GFR-binding peptide
  MOD_RES (5), (6), (37): Xaa is C or S
VPSTXXAPVKTSAISMLYLDNGRVLLLKNYQMIVEEXG

SEQ ID NO: 79939 - protein, 41 aa, Artificial Sequence; identical to SEQ ID NO: 57931
  GFR-binding peptide
  MOD_RES (5), (6), (38), (40): Xaa is C or S

SEQ ID NO: 79940 - protein, 31 aa, Artificial Sequence; identical to SEQ ID NO: 6808
  GFR-binding peptide
  MOD_RES (1), (1): Xaa is C or S

SEQ ID NO: 79941 - protein, 38 aa, Artificial Sequence
  GFR-binding peptide
  MOD_RES (3), (4), (38): Xaa is C or S
  MOD_RES (18), (19), (20), (21), (22): Xaa is A or G
  MOD_RES (23), (24), (25), (26): Xaa is A or G or is absent
GPXXTPTKMSAISMLYLXXXXXXXXXLKNYQGMVVDRX

SEQ ID NO: 79942 - protein, 42 aa, Artificial Sequence; identical to SEQ ID NO: 8585
  GFR-binding peptide
  MOD_RES (6), (7), (40), (42): Xaa is C or S
  MOD_RES (21), (22), (23), (24), (25): Xaa is A or G
  MOD_RES (26), (27), (28), (29): Xaa is A or G or is absent

SEQ ID NO: 79943 - protein, 41 aa, Artificial Sequence; identical to SEQ ID NO: 8586
  GFR-binding peptide
  MOD_RES (5), (6), (39), (41): Xaa is C or S
  MOD_RES (20), (21), (22), (23), (24): Xaa is A or G
  MOD_RES (25), (26), (27), (28): Xaa is A or G or is absent

SEQ ID NO: 79944 - protein, 37 aa, Artificial Sequence; identical to SEQ ID NO: 57933
  GFR-binding peptide
  MOD_RES (5), (6): Xaa is C or S

SEQ ID NO: 79945 - protein, 41 aa, Artificial Sequence; identical to SEQ ID NO: 8588
  GFR-binding peptide
  MOD_RES (4), (5), (39), (41): Xaa is C or S
  MOD_RES (19), (20), (21), (22), (23): Xaa is A or G
  MOD_RES (24), (25), (26), (27): Xaa is A or G or is absent

SEQ ID NO: 79946 - protein, 34 aa, Artificial Sequence
  GFR-binding peptide
  MOD_RES (34), (34): Xaa is C or S
  MOD_RES (14), (15), (16), (17), (18): Xaa is A or G
  MOD_RES (19), (20), (21), (22): Xaa is A or G or is absent
VPEKMSAISILYLXXXXXXXXXLKNYQNMTVESX

SEQ ID NO: 79947 - protein, 34 aa, Artificial Sequence; identical to SEQ ID NO: 6815
  GFR-binding peptide
  MOD_RES (2), (3): Xaa is C or S

SEQ ID NO: 79948 - protein, 37 aa, Artificial Sequence; identical to SEQ ID NO: 8590
  GFR-binding peptide
  MOD_RES (3), (4), (35), (37): Xaa is C or S

SEQ ID NO: 79949 - protein, 36 aa, Artificial Sequence; identical to SEQ ID NO: 6816
  GFR-binding peptide
  MOD_RES (3), (4): Xaa is C or S
  MOD_RES (18), (19), (20), (21), (22): Xaa is A or G
  MOD_RES (23), (24), (25), (26): Xaa is A or G or is absent

SEQ ID NO: 79950 - protein, 41 aa, Artificial Sequence
  GFR-binding peptide
  MOD_RES (5), (6), (40): Xaa is C or S
  MOD_RES (20), (21), (22), (23), (24): Xaa is A or G
  MOD_RES (25), (26), (27), (28): Xaa is A or G or is absent
IPEPXXVPEKMSAISILYLXXXXXXXXXLKNYQNMTVESXA

SEQ ID NO: 79951 - protein, 41 aa, Artificial Sequence; identical to SEQ ID NO: 6817
  GFR-binding peptide
  MOD_RES (5), (6), (38), (40): Xaa is C or S

SEQ ID NO: 79952 - protein, 38 aa, Artificial Sequence
  GFR-binding peptide
  MOD_RES (6), (7): Xaa is C or S
HVPKPXXAPTKLSAISVLYLDDSSNVILKNYQNMVVRS

SEQ ID NO: 79953 - protein, 41 aa, Artificial Sequence; identical to SEQ ID NO: 70870
  GFR-binding peptide
  MOD_RES (6), (7), (41): Xaa is C or S
  MOD_RES (21), (22), (23), (24), (25): Xaa is A or G
  MOD_RES (26), (27), (28), (29): Xaa is A or G or is absent

SEQ ID NO: 79954 - protein, 39 aa, Artificial Sequence; identical to SEQ ID NO: 8592
  GFR-binding peptide
  MOD_RES (2), (3), (36), (38): Xaa is C or S
  MOD_RES (17), (18), (19), (20), (21): Xaa is A or G
  MOD_RES (22), (23), (24), (25): Xaa is A or G or is absent

SEQ ID NO: 79955 - protein, 43 aa, Artificial Sequence; identical to SEQ ID NO: 8593
  GFR-binding peptide
  MOD_RES (5), (6), (41), (43): Xaa is C or S
  MOD_RES (20), (21), (22), (23), (24): Xaa is A or G
  MOD_RES (25), (26), (27), (28): Xaa is A or G or is absent

SEQ ID NO: 79956 - protein, 35 aa, Artificial Sequence; identical to SEQ ID NO: 8594
  GFR-binding peptide
  MOD_RES (1), (34): Xaa is C or S
  MOD_RES (15), (16), (17), (18), (19): Xaa is A or G
  MOD_RES (20), (21), (22), (23): Xaa is A or G or is absent

SEQ ID NO: 79957 - protein, 35 aa, Artificial Sequence; identical to SEQ ID NO: 15899
  GFR-binding peptide
  MOD_RES (2), (3): Xaa is C or S
  MOD_RES (17), (18), (19), (20), (21): Xaa is A or G
  MOD_RES (22), (23), (24), (25): Xaa is A or G or is absent

SEQ ID NO: 79958 - protein, 37 aa, Artificial Sequence; identical to SEQ ID NO: 29922
  GFR-binding peptide
  MOD_RES (4), (5), (37): Xaa is C or S

SEQ ID NO: 79959 - protein, 32 aa, Artificial Sequence
  GFR-binding peptide
  MOD_RES (14), (15), (16), (17), (18): Xaa is A or G
  MOD_RES (19), (20), (21), (22): Xaa is A or G or is absent
VPEKMSAISILYLXXXXXXXXXLKNYQNMTVE

SEQ ID NO: 79960 - protein, 37 aa, Artificial Sequence; identical to SEQ ID NO: 8597
  GFR-binding peptide
  MOD_RES (1), (36): Xaa is C or S
  MOD_RES (15), (16), (17), (18), (19): Xaa is A or G
  MOD_RES (20), (21), (22), (23): Xaa is A or G or is absent

SEQ ID NO: 79961 - protein, 36 aa, Artificial Sequence; identical to SEQ ID NO: 28000
  GFR-binding peptide
  MOD_RES (2), (3): Xaa is C or S
  MOD_RES (17), (18), (19), (20), (21): Xaa is A or G
  MOD_RES (22), (23), (24), (25): Xaa is A or G or is absent

SEQ ID NO: 79962 - protein, 42 aa, Artificial Sequence; identical to SEQ ID NO: 8601
  GFR-binding peptide
  MOD_RES (6), (7), (40), (42): Xaa is C or S
  MOD_RES (21), (22), (23), (24), (25): Xaa is A or G
  MOD_RES (26), (27), (28), (29): Xaa is A or G or is absent

SEQ ID NO: 79963 - protein, 35 aa, Artificial Sequence; identical to SEQ ID NO: 29932
  GFR-binding peptide
  MOD_RES (1), (35): Xaa is C or S
  MOD_RES (15), (16), (17), (18), (19): Xaa is A or G
  MOD_RES (20), (21), (22), (23): Xaa is A or G or is absent

SEQ ID NO: 79964 - protein, 42 aa, Artificial Sequence
  GFR-binding peptide
  MOD_RES (5), (6), (40), (42): Xaa is C or S
  MOD_RES (20), (21), (22), (23), (24): Xaa is A or G
  MOD_RES (25), (26), (27), (28): Xaa is A or G or is absent
SAGPXXTPTKMSAISMLYLXXXXXXXXXLKNYQGMVVDRXGX

SEQ ID NO: 79965 - protein, 38 aa, Artificial Sequence; identical to SEQ ID NO: 6825
  GFR-binding peptide
  MOD_RES (1), (2), (35), (37): Xaa is C or S
  MOD_RES (16), (17), (18), (19), (20): Xaa is A or G
  MOD_RES (21), (22), (23), (24): Xaa is A or G or is absent

SEQ ID NO: 79966 - protein, 36 aa, Artificial Sequence; identical to SEQ ID NO: 14167
  GFR-binding peptide
  MOD_RES (4), (5): Xaa is C or S

SEQ ID NO: 79967 - protein, 42 aa, Artificial Sequence; identical to SEQ ID NO: 57953
  GFR-binding peptide
  MOD_RES (5), (6), (40), (42): Xaa is C or S
  MOD_RES (20), (21), (22), (23), (24): Xaa is A or G
  MOD_RES (25), (26), (27), (28): Xaa is A or G or is absent

SEQ ID NO: 79968 - protein, 40 aa, Artificial Sequence; identical to SEQ ID NO: 6831
  GFR-binding peptide
  MOD_RES (6), (7), (38), (40): Xaa is C or S

SEQ ID NO: 79969 - protein, 38 aa, Artificial Sequence
  GFR-binding peptide
  MOD_RES (2), (3), (35), (37): Xaa is C or S
AXXVPTKLSAISILYLDKGVVTYLKNYQGMAVSEXGXR

SEQ ID NO: 79970 - protein, 44 aa, Artificial Sequence; identical to SEQ ID NO: 29939
  GFR-binding peptide
  MOD_RES (6), (7), (41), (43): Xaa is C or S
  MOD_RES (21), (22), (23), (24), (25): Xaa is A or G
  MOD_RES (26), (27), (28), (29): Xaa is A or G or is absent

SEQ ID NO: 79971 - protein, 37 aa, Artificial Sequence
  GFR-binding peptide
  MOD_RES (3), (4): Xaa is C or S
  MOD_RES (18), (19), (20), (21), (22): Xaa is A or G
  MOD_RES (23), (24), (25), (26): Xaa is A or G or is absent
KAXXVPTKLSAISILYLXXXXXXXXXLKNYQGMAVSE

SEQ ID NO: 79972 - protein, 37 aa, Artificial Sequence; identical to SEQ ID NO: 15909
  GFR-binding peptide
  MOD_RES (3), (4): Xaa is C or S
  MOD_RES (18), (19), (20), (21), (22): Xaa is A or G
  MOD_RES (23), (24), (25), (26): Xaa is A or G or is absent

SEQ ID NO: 79973 - protein, 34 aa, Artificial Sequence
  GFR-binding peptide
  MOD_RES (1), (33): Xaa is C or S
XVPTKLSAISILYLDKGVVTYLKNYQGMAVSEXG

SEQ ID NO: 79974 - protein, 38 aa, Artificial Sequence
  GFR-binding peptide
  MOD_RES (3), (4), (37): Xaa is C or S
  MOD_RES (18), (19), (20), (21), (22): Xaa is A or G
  MOD_RES (23), (24), (25), (26): Xaa is A or G or is absent
STXXAPVKTSAISMLYLXXXXXXXXXLKNYQMIVEEXG

SEQ ID NO: 79975 - protein, 39 aa, Artificial Sequence; identical to SEQ ID NO: 6832
  GFR-binding peptide
  MOD_RES (6), (6): Xaa is C or S
  MOD_RES (20), (21), (22), (23), (24): Xaa is A or G
  MOD_RES (25), (26), (27), (28): Xaa is A or G or is absent

SEQ ID NO: 79976 - protein, 34 aa, Artificial Sequence; identical to SEQ ID NO: 8608
  GFR-binding peptide
  MOD_RES (1), (32), (34): Xaa is C or S

SEQ ID NO: 79977 - protein, 42 aa, Artificial Sequence; identical to SEQ ID NO: 8609
  GFR-binding peptide
  MOD_RES (6), (7), (42): Xaa is C or S
  MOD_RES (21), (22), (23), (24), (25): Xaa is A or G
  MOD_RES (26), (27), (28), (29): Xaa is A or G or is absent

SEQ ID NO: 79978 - protein, 39 aa, Artificial Sequence; identical to SEQ ID NO: 8610
  GFR-binding peptide
  MOD_RES (6), (7), (38): Xaa is C or S

SEQ ID NO: 79979 - protein, 40 aa, Artificial Sequence; identical to SEQ ID NO: 6834
  GFR-binding peptide
  MOD_RES (5), (6), (40): Xaa is C or S
  MOD_RES (20), (21), (22), (23), (24): Xaa is A or G
  MOD_RES (25), (26), (27), (28): Xaa is A or G or is absent

SEQ ID NO: 79980 - protein, 38 aa, Artificial Sequence; identical to SEQ ID NO: 8613
  GFR-binding peptide
  MOD_RES (3), (4), (37): Xaa is C or S
  MOD_RES (18), (19), (20), (21), (22): Xaa is A or G
  MOD_RES (23), (24), (25), (26): Xaa is A or G or is absent

SEQ ID NO: 79981 - protein, 32 aa, Artificial Sequence
  GFR-binding peptide
  MOD_RES (1), (1): Xaa is C or S
XVPEKMSAISILYLDENKNVVLKNYQNMTVES

SEQ ID NO: 79982 - protein, 39 aa, Artificial Sequence; identical to SEQ ID NO: 8615
  GFR-binding peptide
  MOD_RES (1), (2), (36), (38): Xaa is C or S
  MOD_RES (16), (17), (18), (19), (20): Xaa is A or G
  MOD_RES (21), (22), (23), (24): Xaa is A or G or is absent

SEQ ID NO: 79983 - protein, 36 aa, Artificial Sequence; identical to SEQ ID NO: 14179
  GFR-binding peptide
  MOD_RES (1), (2), (36): Xaa is C or S
  MOD_RES (16), (17), (18), (19), (20): Xaa is A or G
  MOD_RES (21), (22), (23), (24): Xaa is A or G or is absent

SEQ ID NO: 79984 - protein, 36 aa, Artificial Sequence; identical to SEQ ID NO: 57961
  GFR-binding peptide
  MOD_RES (2), (3), (35): Xaa is C or S

SEQ ID NO: 79985 - protein, 37 aa, Artificial Sequence; identical to SEQ ID NO: 29954
  GFR-binding peptide
  MOD_RES (4), (5): Xaa is C or S
  MOD_RES (19), (20), (21), (22), (23): Xaa is A or G
  MOD_RES (24), (25), (26), (27): Xaa is A or G or is absent

SEQ ID NO: 79986 - protein, 34 aa, Artificial Sequence; identical to SEQ ID NO: 14180
  GFR-binding peptide
  MOD_RES (1), (2): Xaa is C or S
  MOD_RES (16), (17), (18), (19), (20): Xaa is A or G
  MOD_RES (21), (22), (23), (24): Xaa is A or G or is absent

SEQ ID NO: 79987 - protein, 33 aa, Artificial Sequence; identical to SEQ ID NO: 6840
  GFR-binding peptide
  MOD_RES (1), (2), (33): Xaa is C or S

SEQ ID NO: 79988 - protein, 37 aa, Artificial Sequence; identical to SEQ ID NO: 28022
  GFR-binding peptide
  MOD_RES (3), (4), (36): Xaa is C or S

SEQ ID NO: 79989 - protein, 30 aa, Artificial Sequence; identical to SEQ ID NO: 6843
  GFR-binding peptide

SEQ ID NO: 79990 - protein, 38 aa, Artificial Sequence; identical to SEQ ID NO: 6844
  GFR-binding peptide
  MOD_RES (1), (35), (37): Xaa is C or S
  MOD_RES (15), (16), (17), (18), (19): Xaa is A or G
  MOD_RES (20), (21), (22), (23): Xaa is A or G or is absent

SEQ ID NO: 79991 - protein, 38 aa, Artificial Sequence; identical to SEQ ID NO: 6845
  GFR-binding peptide
  MOD_RES (3), (4), (38): Xaa is C or S
  MOD_RES (18), (19), (20), (21), (22): Xaa is A or G
  MOD_RES (23), (24), (25), (26): Xaa is A or G or is absent

SEQ ID NO: 79992 - protein, 37 aa, Artificial Sequence; identical to SEQ ID NO: 57969
  GFR-binding peptide
  MOD_RES (1), (34), (36): Xaa is C or S
  MOD_RES (15), (16), (17), (18), (19): Xaa is A or G
  MOD_RES (20), (21), (22), (23): Xaa is A or G or is absent

SEQ ID NO: 79993 - protein, 35 aa, Artificial Sequence
  GFR-binding peptide
  MOD_RES (34), (34): Xaa is C or S
  MOD_RES (14), (15), (16), (17), (18): Xaa is A or G
  MOD_RES (19), (20), (21), (22): Xaa is A or G or is absent
VPTKLSAISILYLXXXXXXXXXLKNYQGMAVSEXG

SEQ ID NO: 79994 - protein, 38 aa, Artificial Sequence; identical to SEQ ID NO: 29961
  GFR-binding peptide
  MOD_RES (1), (35), (37): Xaa is C or S
  MOD_RES (15), (16), (17), (18), (19): Xaa is A or G
  MOD_RES (20), (21), (22), (23): Xaa is A or G or is absent

SEQ ID NO: 79995 - protein, 38 aa, Artificial Sequence
  GFR-binding peptide
  MOD_RES (1), (2), (36), (38): Xaa is C or S
  MOD_RES (16), (17), (18), (19), (20): Xaa is A or G
  MOD_RES (21), (22), (23), (24): Xaa is A or G or is absent
XXVPARLSAISILYLXXXXXXXXXLKNYQDMVVEAXGX

SEQ ID NO: 79996 - protein, 40 aa, Artificial Sequence; identical to SEQ ID NO: 57974
  GFR-binding peptide
  MOD_RES (5), (6), (37), (39): Xaa is C or S

SEQ ID NO: 79997 - protein, 35 aa, Artificial Sequence; identical to SEQ ID NO: 6849
  GFR-binding peptide
  MOD_RES (1), (2), (35): Xaa is C or S
  MOD_RES (16), (17), (18), (19), (20): Xaa is A or G
  MOD_RES (21), (22), (23), (24): Xaa is A or G or is absent

SEQ ID NO: 79998 - protein, 39 aa, Artificial Sequence
  GFR-binding peptide
  MOD_RES (1), (2), (36), (38): Xaa is C or S
  MOD_RES (16), (17), (18), (19), (20): Xaa is A or G
  MOD_RES (21), (22), (23), (24): Xaa is A or G or is absent
XXTPTKMSAISMLYLXXXXXXXXXLKNYQGMVVDRXGXS

SEQ ID NO: 79999 - protein, 38 aa, Artificial Sequence; identical to SEQ ID NO: 57976
  GFR-binding peptide
  MOD_RES (1), (35), (37): Xaa is C or S
  MOD_RES (15), (16), (17), (18), (19): Xaa is A or G
  MOD_RES (20), (21), (22), (23): Xaa is A or G or is absent

SEQ ID NO: 80000 - protein, 36 aa, Artificial Sequence; identical to SEQ ID NO: 6850
  GFR-binding peptide
  MOD_RES (4), (4): Xaa is C or S
  MOD_RES (18), (19), (20), (21), (22): Xaa is A or G
  MOD_RES (23), (24), (25), (26): Xaa is A or G or is absent

SEQ ID NO: 80001 - protein, 38 aa, Artificial Sequence; identical to SEQ ID NO: 8628
  GFR-binding peptide
  MOD_RES (1), (36), (38): Xaa is C or S
  MOD_RES (15), (16), (17), (18), (19): Xaa is A or G
  MOD_RES (20), (21), (22), (23): Xaa is A or G or is absent

SEQ ID NO: 80002 - protein, 37 aa, Artificial Sequence; identical to SEQ ID NO: 70911
  GFR-binding peptide
  MOD_RES (3), (4), (36): Xaa is C or S

SEQ ID NO: 80003 - protein, 36 aa, Artificial Sequence; identical to SEQ ID NO: 8629
  GFR-binding peptide
  MOD_RES (34), (36): Xaa is C or S
  MOD_RES (14), (15), (16), (17), (18): Xaa is A or G
  MOD_RES (19), (20), (21), (22): Xaa is A or G or is absent

SEQ ID NO: 80004 - protein, 39 aa, Artificial Sequence
  GFR-binding peptide
  MOD_RES (1), (2), (36), (38): Xaa is C or S
  MOD_RES (16), (17), (18), (19), (20): Xaa is A or G
  MOD_RES (21), (22), (23), (24): Xaa is A or G or is absent
XXVPARLSAISILYLXXXXXXXXXLKNYQDMVVEAXGXR

SEQ ID NO: 80005 - protein, 37 aa, Artificial Sequence; identical to SEQ ID NO: 8631
  GFR-binding peptide
  MOD_RES (1), (34), (36): Xaa is C or S
  MOD_RES (15), (16), (17), (18), (19): Xaa is A or G
  MOD_RES (20), (21), (22), (23): Xaa is A or G or is absent

SEQ ID NO: 80006 - protein, 42 aa, Artificial Sequence; identical to SEQ ID NO: 8633
  GFR-binding peptide
  MOD_RES (3), (4), (39), (41): Xaa is C or S
  MOD_RES (18), (19), (20), (21), (22): Xaa is A or G
  MOD_RES (23), (24), (25), (26): Xaa is A or G or is absent

SEQ ID NO: 80007 - protein, 37 aa, Artificial Sequence; identical to SEQ ID NO: 6853
  GFR-binding peptide
  MOD_RES (2), (3), (37): Xaa is C or S
  MOD_RES (17), (18), (19), (20), (21): Xaa is A or G
  MOD_RES (22), (23), (24), (25): Xaa is A or G or is absent

SEQ ID NO: 80008 - protein, 36 aa, Artificial Sequence; identical to SEQ ID NO: 8636
  GFR-binding peptide
  MOD_RES (3), (4), (36): Xaa is C or S

SEQ ID NO: 80009 - protein, 40 aa, Artificial Sequence
  GFR-binding peptide
  MOD_RES (3), (4), (38), (40): Xaa is C or S
  MOD_RES (18), (19), (20), (21), (22): Xaa is A or G
  MOD_RES (23), (24), (25), (26): Xaa is A or G or is absent
EPXXVPEKMSAISILYLXXXXXXXXXLKNYQNMTVESXAX

SEQ ID NO: 80010 - protein, 33 aa, Artificial Sequence; identical to SEQ ID NO: 6857
  GFR-binding peptide
  MOD_RES (32), (32): Xaa is C or S

SEQ ID NO: 80011 - protein, 37 aa, Artificial Sequence; identical to SEQ ID NO: 6858
  GFR-binding peptide
  MOD_RES (1), (35), (37): Xaa is C or S
  MOD_RES (15), (16), (17), (18), (19): Xaa is A or G
  MOD_RES (20), (21), (22), (23): Xaa is A or G or is absent

SEQ ID NO: 80012 - protein, 34 aa, Artificial Sequence; identical to SEQ ID NO: 15934
  GFR-binding peptide
  MOD_RES (1), (33): Xaa is C or S

SEQ ID NO: 80013 - protein, 39 aa, Artificial Sequence; identical to SEQ ID NO: 57985
  GFR-binding peptide
  MOD_RES (6), (7): Xaa is C or S
  MOD_RES (21), (22), (23), (24), (25): Xaa is A or G
  MOD_RES (26), (27), (28), (29): Xaa is A or G or is absent

SEQ ID NO: 80014 - protein, 38 aa, Artificial Sequence; identical to SEQ ID NO: 6862
  GFR-binding peptide
  MOD_RES (4), (5): Xaa is C or S
  MOD_RES (19), (20), (21), (22), (23): Xaa is A or G
  MOD_RES (24), (25), (26), (27): Xaa is A or G or is absent

SEQ ID NO: 80015 - protein, 43 aa, Artificial Sequence; identical to SEQ ID NO: 6864
  GFR-binding peptide
  MOD_RES (6), (7), (40), (42): Xaa is C or S
  MOD_RES (21), (22), (23), (24), (25): Xaa is A or G
  MOD_RES (26), (27), (28), (29): Xaa is A or G or is absent

SEQ ID NO: 80016 - protein, 35 aa, Artificial Sequence; identical to SEQ ID NO: 8646
  GFR-binding peptide
  MOD_RES (3), (35): Xaa is C or S

SEQ ID NO: 80017 - protein, 37 aa, Artificial Sequence; identical to SEQ ID NO: 15942
  GFR-binding peptide
  MOD_RES (34), (36): Xaa is C or S
  MOD_RES (14), (15), (16), (17), (18): Xaa is A or G
  MOD_RES (19), (20), (21), (22): Xaa is A or G or is absent

SEQ ID NO: 80018 - protein, 40 aa, Artificial Sequence; identical to SEQ ID NO: 15943
  GFR-binding peptide
  MOD_RES (4), (5), (39): Xaa is C or S
  MOD_RES (19), (20), (21), (22), (23): Xaa is A or G
  MOD_RES (24), (25), (26), (27): Xaa is A or G or is absent

SEQ ID NO: 80019 - protein, 37 aa, Artificial Sequence; identical to SEQ ID NO: 8647
  GFR-binding peptide
  MOD_RES (3), (4), (36): Xaa is C or S

SEQ ID NO: 80020 - protein, 36 aa, Artificial Sequence; identical to SEQ ID NO: 8649
  GFR-binding peptide
  MOD_RES (3), (4): Xaa is C or S
  MOD_RES (18), (19), (20), (21), (22): Xaa is A or G
  MOD_RES (23), (24), (25), (26): Xaa is A or G or is absent

SEQ ID NO: 80021 - protein, 35 aa, Artificial Sequence; identical to SEQ ID NO: 8651
  GFR-binding peptide
  MOD_RES (3), (4), (35): Xaa is C or S

SEQ ID NO: 80022 - protein, 40 aa, Artificial Sequence; identical to SEQ ID NO: 6869
  GFR-binding peptide
  MOD_RES (3), (4), (37), (39): Xaa is C or S
  MOD_RES (18), (19), (20), (21), (22): Xaa is A or G
  MOD_RES (23), (24), (25), (26): Xaa is A or G or is absent

SEQ ID NO: 80023 - protein, 39 aa, Artificial Sequence; identical to SEQ ID NO: 57995
  GFR-binding peptide
  MOD_RES (5), (6), (37), (39): Xaa is C or S

SEQ ID NO: 80024 - protein, 39 aa, Artificial Sequence; identical to SEQ ID NO: 8652
  GFR-binding peptide
  MOD_RES (6), (7): Xaa is C or S
  MOD_RES (21), (22), (23), (24), (25): Xaa is A or G
  MOD_RES (26), (27), (28), (29): Xaa is A or G or is absent

SEQ ID NO: 80025 - protein, 35 aa, Artificial Sequence; identical to SEQ ID NO: 6870
  GFR-binding peptide
  MOD_RES (1), (33), (35): Xaa is C or S

SEQ ID NO: 80026 - protein, 36 aa, Artificial Sequence; identical to SEQ ID NO: 28049
  GFR-binding peptide
  MOD_RES (1), (2), (36): Xaa is C or S
  MOD_RES (16), (17), (18), (19), (20): Xaa is A or G
  MOD_RES (21), (22), (23), (24): Xaa is A or G or is absent

SEQ ID NO: 80027 - protein, 41 aa, Artificial Sequence; identical to SEQ ID NO: 57997
  GFR-binding peptide
  MOD_RES (6), (7), (41): Xaa is C or S
  MOD_RES (21), (22), (23), (24), (25): Xaa is A or G
  MOD_RES (26), (27), (28), (29): Xaa is A or G or is absent

SEQ ID NO: 80028 - protein, 34 aa, Artificial Sequence
  GFR-binding peptide
  MOD_RES (1), (33): Xaa is C or S
XVPARLSAISILYLDAANNVVLKNYQDMVVEAXG

SEQ ID NO: 80029 - protein, 35 aa, Artificial Sequence; identical to SEQ ID NO: 15950
  GFR-binding peptide
  MOD_RES (1), (2), (34): Xaa is C or S

SEQ ID NO: 80030 - protein, 35 aa, Artificial Sequence; identical to SEQ ID NO: 6872
  GFR-binding peptide
  MOD_RES (3), (4): Xaa is C or S

SEQ ID NO: 80031 - protein, 38 aa, Artificial Sequence; identical to SEQ ID NO: 6873
  GFR-binding peptide
  MOD_RES (3), (4): Xaa is C or S
  MOD_RES (18), (19), (20), (21), (22): Xaa is A or G
  MOD_RES (23), (24), (25), (26): Xaa is A or G or is absent

SEQ ID NO: 80032 - protein, 38 aa, Artificial Sequence; identical to SEQ ID NO: 8656
  GFR-binding peptide
  MOD_RES (4), (5): Xaa is C or S
  MOD_RES (19), (20), (21), (22), (23): Xaa is A or G
  MOD_RES (24), (25), (26), (27): Xaa is A or G or is absent

SEQ ID NO: 80033 - protein, 33 aa, Artificial Sequence; identical to SEQ ID NO: 8658
  GFR-binding peptide
  MOD_RES (1), (2), (33): Xaa is C or S

SEQ ID NO: 80034 - protein, 35 aa, Artificial Sequence; identical to SEQ ID NO: 6875
  GFR-binding peptide
  MOD_RES (1), (2), (35): Xaa is C or S
  MOD_RES (16), (17), (18), (19), (20): Xaa is A or G
  MOD_RES (21), (22), (23), (24): Xaa is A or G or is absent

SEQ ID NO: 80035 - protein, 40 aa, Artificial Sequence; identical to SEQ ID NO: 8659
  GFR-binding peptide
  MOD_RES (3), (4), (39): Xaa is C or S
  MOD_RES (18), (19), (20), (21), (22): Xaa is A or G
  MOD_RES (23), (24), (25), (26): Xaa is A or G or is absent

SEQ ID NO: 80036 - protein, 37 aa, Artificial Sequence
  GFR-binding peptide
  MOD_RES (4), (5): Xaa is C or S
  MOD_RES (19), (20), (21), (22), (23): Xaa is A or G
  MOD_RES (24), (25), (26), (27): Xaa is A or G or is absent
AGPXXTPTKMSAISMLYLXXXXXXXXXLKNYQGMVVD

SEQ ID NO: 80037 - protein, 34 aa, Artificial Sequence; identical to SEQ ID NO: 8660
  GFR-binding peptide
  MOD_RES (1), (1): Xaa is C or S
  MOD_RES (15), (16), (17), (18), (19): Xaa is A or G
  MOD_RES (20), (21), (22), (23): Xaa is A or G or is absent

SEQ ID NO: 80038 - protein, 38 aa, Artificial Sequence; identical to SEQ ID NO: 8661
  GFR-binding peptide
  MOD_RES (4), (5): Xaa is C or S
  MOD_RES (19), (20), (21), (22), (23): Xaa is A or G
  MOD_RES (24), (25), (26), (27): Xaa is A or G or is absent

SEQ ID NO: 80039 - protein, 35 aa, Artificial Sequence; identical to SEQ ID NO: 6877
  GFR-binding peptide
  MOD_RES (2), (3), (34): Xaa is C or S

SEQ ID NO: 80040 - protein, 38 aa, Artificial Sequence; identical to SEQ ID NO: 8667
  GFR-binding peptide
  MOD_RES (2), (3), (37): Xaa is C or S
  MOD_RES (17), (18), (19), (20), (21): Xaa is A or G
  MOD_RES (22), (23), (24), (25): Xaa is A or G or is absent

SEQ ID NO: 80041 - protein, 36 aa, Artificial Sequence; identical to SEQ ID NO: 30005
  GFR-binding peptide
  MOD_RES (2), (3): Xaa is C or S
  MOD_RES (17), (18), (19), (20), (21): Xaa is A or G
  MOD_RES (22), (23), (24), (25): Xaa is A or G or is absent

SEQ ID NO: 80042 - protein, 43 aa, Artificial Sequence; identical to SEQ ID NO: 8670
  GFR-binding peptide
  MOD_RES (6), (7), (41), (43): Xaa is C or S
  MOD_RES (21), (22), (23), (24), (25): Xaa is A or G
  MOD_RES (26), (27), (28), (29): Xaa is A or G or is absent

SEQ ID NO: 80043 - protein, 37 aa, Artificial Sequence
  GFR-binding peptide
  MOD_RES (3), (4): Xaa is C or S
  MOD_RES (18), (19), (20), (21), (22): Xaa is A or G
  MOD_RES (23), (24), (25), (26): Xaa is A or G or is absent
ASXXVPARLSAISILYLXXXXXXXXXLKNYQDMVVEA

SEQ ID NO: 80044 - protein, 35 aa, Artificial Sequence; identical to SEQ ID NO: 58007
  GFR-binding peptide
  MOD_RES (2), (3), (34): Xaa is C or S

SEQ ID NO: 80045 - protein, 43 aa, Artificial Sequence; identical to SEQ ID NO: 15968
  GFR-binding peptide
  MOD_RES (6), (7), (41), (43): Xaa is C or S
  MOD_RES (21), (22), (23), (24), (25): Xaa is A or G
  MOD_RES (26), (27), (28), (29): Xaa is A or G or is absent

SEQ ID NO: 80046 - protein, 39 aa, Artificial Sequence; identical to SEQ ID NO: 6883
  GFR-binding peptide
  MOD_RES (4), (5), (38): Xaa is C or S
  MOD_RES (19), (20), (21), (22), (23): Xaa is A or G
  MOD_RES (24), (25), (26), (27): Xaa is A or G or is absent

SEQ ID NO: 80047 - protein, 33 aa, Artificial Sequence
  GFR-binding peptide
  MOD_RES (1), (1): Xaa is C or S
  MOD_RES (15), (16), (17), (18), (19): Xaa is A or G
  MOD_RES (20), (21), (22), (23): Xaa is A or G or is absent
XVPEKMSAISILYLXXXXXXXXXLKNYQNMTVE

SEQ ID NO: 80048 - protein, 38 aa, Artificial Sequence; identical to SEQ ID NO: 6885
  GFR-binding peptide
  MOD_RES (4), (36), (38): Xaa is C or S

SEQ ID NO: 80049 - protein, 35 aa, Artificial Sequence; identical to SEQ ID NO: 6886
  GFR-binding peptide
  MOD_RES (3), (4): Xaa is C or S

SEQ ID NO: 80050 - protein, 44 aa, Artificial Sequence
  GFR-binding peptide
  MOD_RES (6), (7), (41), (43): Xaa is C or S
  MOD_RES (21), (22), (23), (24), (25): Xaa is A or G
  MOD_RES (26), (27), (28), (29): Xaa is A or G or is absent
GSAGPXXTPTKMSAISMLYLXXXXXXXXXLKNYQGMVVDRXGXS

SEQ ID NO: 80051 - protein, 38 aa, Artificial Sequence; identical to SEQ ID NO: 8674
  GFR-binding peptide
  MOD_RES (3), (4), (35), (37): Xaa is C or S

SEQ ID NO: 80052 - protein, 39 aa, Artificial Sequence
  GFR-binding peptide
  MOD_RES (2), (3), (37), (39): Xaa is C or S
  MOD_RES (17), (18), (19), (20), (21): Xaa is A or G
  MOD_RES (22), (23), (24), (25): Xaa is A or G or is absent
PXXVPEKMSAISILYLXXXXXXXXXLKNYQNMTVESXAX

SEQ ID NO: 80053 - protein, 37 aa, Artificial Sequence; identical to SEQ ID NO: 6890
  GFR-binding peptide
  MOD_RES (4), (5), (36): Xaa is C or S

SEQ ID NO: 80054 - protein, 32 aa, Artificial Sequence; identical to SEQ ID NO: 58016
  GFR-binding peptide
  MOD_RES (1), (32): Xaa is C or S

SEQ ID NO: 80055 - protein, 35 aa, Artificial Sequence
  GFR-binding peptide
  MOD_RES (3), (4): Xaa is C or S
KAXXVPTKLSAISILYLDKGVVTYLKNYQGMAVSE

SEQ ID NO: 80056 - protein, 40 aa, Artificial Sequence
  GFR-binding peptide
  MOD_RES (3), (4), (38), (40): Xaa is C or S
  MOD_RES (18), (19), (20), (21), (22): Xaa is A or G
  MOD_RES (23), (24), (25), (26): Xaa is A or G or is absent
GPXXTPTKMSAISMLYLXXXXXXXXXLKNYQGMVVDRXGX

SEQ ID NO: 80057 - protein, 32 aa, Artificial Sequence
  GFR-binding peptide
  MOD_RES (1), (1): Xaa is C or S
XVPTKLSAISILYLDKGVVTYLKNYQGMAVSE

SEQ ID NO: 80058 - protein, 43 aa, Artificial Sequence
  GFR-binding peptide
  MOD_RES (6), (7), (41), (43): Xaa is C or S
  MOD_RES (21), (22), (23), (24), (25): Xaa is A or G
  MOD_RES (26), (27), (28), (29): Xaa is A or G or is absent
KASKAXXVPTKLSAISILYLXXXXXXXXXLKNYQGMAVSEXGX

SEQ ID NO: 80059 - protein, 39 aa, Artificial Sequence; identical to SEQ ID NO: 15976
  GFR-binding peptide
  MOD_RES (4), (5), (39): Xaa is C or S
  MOD_RES (19), (20), (21), (22), (23): Xaa is A or G
  MOD_RES (24), (25), (26), (27): Xaa is A or G or is absent

SEQ ID NO: 80060 - protein, 41 aa, Artificial Sequence; identical to SEQ ID NO: 6893
  GFR-binding peptide
  MOD_RES (6), (7), (38), (40): Xaa is C or S

SEQ ID NO: 80061 - protein, 44 aa, Artificial Sequence; identical to SEQ ID NO: 6895
  GFR-binding peptide
  MOD_RES (6), (7), (41), (43): Xaa is C or S
  MOD_RES (21), (22), (23), (24), (25): Xaa is A or G
  MOD_RES (26), (27), (28), (29): Xaa is A or G or is absent

SEQ ID NO: 80062 - protein, 38 aa, Artificial Sequence; identical to SEQ ID NO: 30015
  GFR-binding peptide
  MOD_RES (4), (5): Xaa is C or S
  MOD_RES (19), (20), (21), (22), (23): Xaa is A or G
  MOD_RES (24), (25), (26), (27): Xaa is A or G or is absent

SEQ ID NO: 80063 - protein, 36 aa, Artificial Sequence; identical to SEQ ID NO: 8677
  GFR-binding peptide
  MOD_RES (1), (2): Xaa is C or S
  MOD_RES (16), (17), (18), (19), (20): Xaa is A or G
  MOD_RES (21), (22), (23), (24): Xaa is A or G or is absent

SEQ ID NO: 80064 - protein, 39 aa, Artificial Sequence; identical to SEQ ID NO: 6896
  GFR-binding peptide
  MOD_RES (4), (5), (39): Xaa is C or S
  MOD_RES (19), (20), (21), (22), (23): Xaa is A or G
  MOD_RES (24), (25), (26), (27): Xaa is A or G or is absent

SEQ ID NO: 80065 - protein, 34 aa, Artificial Sequence; identical to SEQ ID NO: 15979
  GFR-binding peptide
  MOD_RES (34), (34): Xaa is C or S
  MOD_RES (14), (15), (16), (17), (18): Xaa is A or G
  MOD_RES (19), (20), (21), (22): Xaa is A or G or is absent

SEQ ID NO: 80066 - protein, 43 aa, Artificial Sequence; identical to SEQ ID NO: 6897
  GFR-binding peptide
  MOD_RES (5), (6), (40), (42): Xaa is C or S
  MOD_RES (20), (21), (22), (23), (24): Xaa is A or G
  MOD_RES (25), (26), (27), (28): Xaa is A or G or is absent

SEQ ID NO: 80067 - protein, 38 aa, Artificial Sequence; identical to SEQ ID NO: 6898
  GFR-binding peptide
  MOD_RES (2), (3), (36), (38): Xaa is C or S
  MOD_RES (17), (18), (19), (20), (21): Xaa is A or G
  MOD_RES (22), (23), (24), (25): Xaa is A or G or is absent

SEQ ID NO: 80068 - protein, 35 aa, Artificial Sequence; identical to SEQ ID NO: 28082
  GFR-binding peptide
  MOD_RES (3), (4): Xaa is C or S

SEQ ID NO: 80069 - protein, 36 aa, Artificial Sequence
  GFR-binding peptide
  MOD_RES (3), (4), (35): Xaa is C or S
STXXAPVKTSAISMLYLDNGRVLLLKNYQMIVEEXG

SEQ ID NO: 80070 - protein, 39 aa, Artificial Sequence; identical to SEQ ID NO: 15982
  GFR-binding peptide
  MOD_RES (3), (4), (38): Xaa is C or S
  MOD_RES (18), (19), (20), (21), (22): Xaa is A or G
  MOD_RES (23), (24), (25), (26): Xaa is A or G or is absent

SEQ ID NO: 80071 - protein, 37 aa, Artificial Sequence; identical to SEQ ID NO: 6901
  GFR-binding peptide
  MOD_RES (3), (4): Xaa is C or S
  MOD_RES (18), (19), (20), (21), (22): Xaa is A or G
  MOD_RES (23), (24), (25), (26): Xaa is A or G or is absent

SEQ ID NO: 80072 - protein, 40 aa, Artificial Sequence; identical to SEQ ID NO: 6902
  GFR-binding peptide
  MOD_RES (2), (3), (37), (39): Xaa is C or S
  MOD_RES (17), (18), (19), (20), (21): Xaa is A or G
  MOD_RES (22), (23), (24), (25): Xaa is A or G or is absent

SEQ ID NO: 80073 - protein, 39 aa, Artificial Sequence; identical to SEQ ID NO: 15985
  GFR-binding peptide
  MOD_RES (4), (5), (37), (39): Xaa is C or S

SEQ ID NO: 80074 - protein, 38 aa, Artificial Sequence; identical to SEQ ID NO: 8680
  GFR-binding peptide
  MOD_RES (5), (6), (37): Xaa is C or S

SEQ ID NO: 80075 - protein, 42 aa, Artificial Sequence
  GFR-binding peptide
  MOD_RES (6), (7), (39), (41): Xaa is C or S
KASKAXXVPTKLSAISILYLDKGVVTYLKNYQGMAVSEXGXR

SEQ ID NO: 80076 - protein, 42 aa, Artificial Sequence; identical to SEQ ID NO: 58033
  GFR-binding peptide
  MOD_RES (6), (7), (40), (42): Xaa is C or S
  MOD_RES (21), (22), (23), (24), (25): Xaa is A or G
  MOD_RES (26), (27), (28), (29): Xaa is A or G or is absent

SEQ ID NO: 80077 - protein, 35 aa, Artificial Sequence
  GFR-binding peptide
  MOD_RES (1), (2), (33), (35): Xaa is C or S
XXAPVKTSAISMLYLDNGRVLLLKNYQMIVEEXGX

SEQ ID NO: 80078 - protein, 40 aa, Artificial Sequence; identical to SEQ ID NO: 6903
  GFR-binding peptide
  MOD_RES (4), (38), (40): Xaa is C or S
  MOD_RES (18), (19), (20), (21), (22): Xaa is A or G
  MOD_RES (23), (24), (25), (26): Xaa is A or G or is absent

SEQ ID NO: 80079 - protein, 32 aa, Artificial Sequence; identical to SEQ ID NO: 6905
  GFR-binding peptide
  MOD_RES (14), (15), (16), (17), (18): Xaa is A or G
  MOD_RES (19), (20), (21), (22): Xaa is A or G or is absent

SEQ ID NO: 80080 - protein, 35 aa, Artificial Sequence; identical to SEQ ID NO: 58037
  GFR-binding peptide
  MOD_RES (1), (32), (34): Xaa is C or S

SEQ ID NO: 80081 - protein, 41 aa, Artificial Sequence; identical to SEQ ID NO: 58039
  GFR-binding peptide
  MOD_RES (4), (5), (39), (41): Xaa is C or S
  MOD_RES (19), (20), (21), (22), (23): Xaa is A or G
  MOD_RES (24), (25), (26), (27): Xaa is A or G or is absent

SEQ ID NO: 80082 - protein, 37 aa, Artificial Sequence
  GFR-binding peptide
  MOD_RES (2), (3), (35), (37): Xaa is C or S
PXXVPEKMSAISILYLDENKNVVLKNYQNMTVESXAX

SEQ ID NO: 80083 - protein, 33 aa, Artificial Sequence; identical to SEQ ID NO: 30027
  GFR-binding peptide
  MOD_RES (1), (33): Xaa is C or S

SEQ ID NO: 80084 - protein, 35 aa, Artificial Sequence; identical to SEQ ID NO: 8688
  GFR-binding peptide
  MOD_RES (1), (2), (34): Xaa is C or S

SEQ ID NO: 80085 - protein, 39 aa, Artificial Sequence; identical to SEQ ID NO: 8691
  GFR-binding peptide
  MOD_RES (4), (5), (37), (39): Xaa is C or S

SEQ ID NO: 80086 - protein, 44 aa, Artificial Sequence; identical to SEQ ID NO: 70981
  GFR-binding peptide
  MOD_RES (6), (7), (41), (43): Xaa is C or S
  MOD_RES (21), (22), (23), (24), (25): Xaa is A or G
  MOD_RES (26), (27), (28), (29): Xaa is A or G or is absent

SEQ ID NO: 80087 - protein, 37 aa, Artificial Sequence; identical to SEQ ID NO: 8693
  GFR-binding peptide
  MOD_RES (3), (4), (35), (37): Xaa is C or S

SEQ ID NO: 80088 - protein, 31 aa, Artificial Sequence; identical to SEQ ID NO: 6916
  GFR-binding peptide
  MOD_RES (1), (1): Xaa is C or S

SEQ ID NO: 80089 - protein, 37 aa, Artificial Sequence; identical to SEQ ID NO: 14258
  GFR-binding peptide
  MOD_RES (3), (4): Xaa is C or S
  MOD_RES (18), (19), (20), (21), (22): Xaa is A or G
  MOD_RES (23), (24), (25), (26): Xaa is A or G or is absent

SEQ ID NO: 80090 - protein, 41 aa, Artificial Sequence; identical to SEQ ID NO: 6917
  GFR-binding peptide
  MOD_RES (4), (5), (40): Xaa is C or S
  MOD_RES (19), (20), (21), (22), (23): Xaa is A or G
  MOD_RES (24), (25), (26), (27): Xaa is A or G or is absent

SEQ ID NO: 80091 - protein, 37 aa, Artificial Sequence; identical to SEQ ID NO: 8695
  GFR-binding peptide
  MOD_RES (1), (2), (35), (37): Xaa is C or S

SEQ ID NO: 80092 - protein, 37 aa, Artificial Sequence; identical to SEQ ID NO: 8696
  GFR-binding peptide
  MOD_RES (1), (2), (35), (37): Xaa is C or S
  MOD_RES (16), (17), (18), (19), (20): Xaa is A or G
  MOD_RES (21), (22), (23), (24): Xaa is A or G or is absent

SEQ ID NO: 80093 - protein, 36 aa, Artificial Sequence; identical to SEQ ID NO: 30034
  GFR-binding peptide
  MOD_RES (3), (4): Xaa is C or S
  MOD_RES (18), (19), (20), (21), (22): Xaa is A or G
  MOD_RES (23), (24), (25), (26): Xaa is A or G or is absent

SEQ ID NO: 80094 - protein, 39 aa, Artificial Sequence
  GFR-binding peptide
  MOD_RES (2), (3), (37), (39): Xaa is C or S
  MOD_RES (17), (18), (19), (20), (21): Xaa is A or G
  MOD_RES (22), (23), (24), (25): Xaa is A or G or is absent
SXXVPARLSAISILYLXXXXXXXXXLKNYQDMVVEAXGX

SEQ ID NO: 80095 - protein, 40 aa, Artificial Sequence
  GFR-binding peptide
  MOD_RES (6), (7), (40): Xaa is C or S
  MOD_RES (21), (22), (23), (24), (25): Xaa is A or G
  MOD_RES (26), (27), (28), (29): Xaa is A or G or is absent
RVPSTXXAPVKTSAISMLYLXXXXXXXXXLKNYQMIVEEX

SEQ ID NO: 80096 - protein, 34 aa, Artificial Sequence; identical to SEQ ID NO: 6920
  GFR-binding peptide
  MOD_RES (1), (2): Xaa is C or S
  MOD_RES (16), (17), (18), (19), (20): Xaa is A or G
  MOD_RES (21), (22), (23), (24): Xaa is A or G or is absent

SEQ ID NO: 80097 - protein, 34 aa, Artificial Sequence; identical to SEQ ID NO: 8697
  GFR-binding peptide
  MOD_RES (1), (34): Xaa is C or S
  MOD_RES (15), (16), (17), (18), (19): Xaa is A or G
  MOD_RES (20), (21), (22), (23): Xaa is A or G or is absent

SEQ ID NO: 80098 - protein, 39 aa, Artificial Sequence
  GFR-binding peptide
  MOD_RES (3), (4), (37), (39): Xaa is C or S
  MOD_RES (18), (19), (20), (21), (22): Xaa is A or G
  MOD_RES (23), (24), (25), (26): Xaa is A or G or is absent
STXXAPVKTSAISMLYLXXXXXXXXXLKNYQMIVEEXGX

SEQ ID NO: 80099 - protein, 37 aa, Artificial Sequence; identical to SEQ ID NO: 8699
  GFR-binding peptide
  MOD_RES (1), (34), (36): Xaa is C or S

SEQ ID NO: 80100 - protein, 35 aa, Artificial Sequence; identical to SEQ ID NO: 6924
  GFR-binding peptide
  MOD_RES (2), (3), (35): Xaa is C or S

SEQ ID NO: 80101 - protein, 39 aa, Artificial Sequence; identical to SEQ ID NO: 8702
  GFR-binding peptide
  MOD_RES (4), (5), (39): Xaa is C or S
  MOD_RES (19), (20), (21), (22), (23): Xaa is A or G
  MOD_RES (24), (25), (26), (27): Xaa is A or G or is absent

SEQ ID NO: 80102 - protein, 35 aa, Artificial Sequence; identical to SEQ ID NO: 58052
  GFR-binding peptide
  MOD_RES (4), (5): Xaa is C or S

SEQ ID NO: 80103 - protein, 43 aa, Artificial Sequence; identical to SEQ ID NO: 30042
  GFR-binding peptide
  MOD_RES (5), (6), (40), (42): Xaa is C or S
  MOD_RES (20), (21), (22), (23), (24): Xaa is A or G
  MOD_RES (25), (26), (27), (28): Xaa is A or G or is absent

SEQ ID NO: 80104 - protein, 43 aa, Artificial Sequence; identical to SEQ ID NO: 58054
  GFR-binding peptide
  MOD_RES (6), (7), (41), (43): Xaa is C or S
  MOD_RES (21), (22), (23), (24), (25): Xaa is A or G
  MOD_RES (26), (27), (28), (29): Xaa is A or G or is absent

SEQ ID NO: 80105 - protein, 34 aa, Artificial Sequence; identical to SEQ ID NO: 6929
  GFR-binding peptide
  MOD_RES (2), (3), (34): Xaa is C or S

SEQ ID NO: 80106 - protein, 40 aa, Artificial Sequence; identical to SEQ ID NO: 30044
  GFR-binding peptide
  MOD_RES (4), (5), (37), (39): Xaa is C or S

SEQ ID NO: 80107 - protein, 43 aa, Artificial Sequence; identical to SEQ ID NO: 8706
  GFR-binding peptide
  MOD_RES (5), (6), (40), (42): Xaa is C or S
  MOD_RES (20), (21), (22), (23), (24): Xaa is A or G
  MOD_RES (25), (26), (27), (28): Xaa is A or G or is absent

SEQ ID NO: 80108 - protein, 35 aa, Artificial Sequence
  GFR-binding peptide
  MOD_RES (3), (4): Xaa is C or S
ASXXVPARLSAISILYLDAANNVVLKNYQDMVVEA

SEQ ID NO: 80109 - protein, 38 aa, Artificial Sequence; identical to SEQ ID NO: 6930
  GFR-binding peptide
  MOD_RES (6), (7), (38): Xaa is C or S

SEQ ID NO: 80110 - protein, 34 aa, Artificial Sequence
  GFR-binding peptide
  MOD_RES (1), (33): Xaa is C or S
XTPTKMSAISMLYLNDKQQIILKNYQGMVVDRXG

SEQ ID NO: 80111 - protein, 34 aa, Artificial Sequence
  GFR-binding peptide
  MOD_RES (1), (2): Xaa is C or S
  MOD_RES (16), (17), (18), (19), (20): Xaa is A or G
  MOD_RES (21), (22), (23), (24): Xaa is A or G or is absent
XXVPARLSAISILYLXXXXXXXXXLKNYQDMVVE

SEQ ID NO: 80112 - protein, 33 aa, Artificial Sequence; identical to SEQ ID NO: 6934
  GFR-binding peptide
  MOD_RES (14), (15), (16), (17), (18): Xaa is A or G
  MOD_RES (19), (20), (21), (22): Xaa is A or G or is absent

SEQ ID NO: 80113 - protein, 36 aa, Artificial Sequence; identical to SEQ ID NO: 8711
  GFR-binding peptide
  MOD_RES (1), (2), (35): Xaa is C or S
  MOD_RES (16), (17), (18), (19), (20): Xaa is A or G
  MOD_RES (21), (22), (23), (24): Xaa is A or G or is absent

SEQ ID NO: 80114 - protein, 39 aa, Artificial Sequence; identical to SEQ ID NO: 6935
  GFR-binding peptide
  MOD_RES (1), (2), (36), (38): Xaa is C or S
  MOD_RES (16), (17), (18), (19), (20): Xaa is A or G
  MOD_RES (21), (22), (23), (24): Xaa is A or G or is absent

SEQ ID NO: 80115 - protein, 32 aa, Artificial Sequence; identical to SEQ ID NO: 8715
  GFR-binding peptide
  MOD_RES (1), (1): Xaa is C or S

SEQ ID NO: 80116 - protein, 37 aa, Artificial Sequence; identical to SEQ ID NO: 67601
  GFR-binding peptide
  MOD_RES (1), (2), (34), (36): Xaa is C or S

SEQ ID NO: 80117 - protein, 39 aa, Artificial Sequence; identical to SEQ ID NO: 71007
  GFR-binding peptide
  MOD_RES (4), (5), (39): Xaa is C or S
  MOD_RES (19), (20), (21), (22), (23): Xaa is A or G
  MOD_RES (24), (25), (26), (27): Xaa is A or G or is absent

SEQ ID NO: 80118 - protein, 42 aa, Artificial Sequence; identical to SEQ ID NO: 58061
  GFR-binding peptide
  MOD_RES (5), (6), (39), (41): Xaa is C or S
  MOD_RES (20), (21), (22), (23), (24): Xaa is A or G
  MOD_RES (25), (26), (27), (28): Xaa is A or G or is absent

SEQ ID NO: 80119 - protein, 40 aa, Artificial Sequence
  GFR-binding peptide
  MOD_RES (4), (5), (39): Xaa is C or S
  MOD_RES (19), (20), (21), (22), (23): Xaa is A or G
  MOD_RES (24), (25), (26), (27): Xaa is A or G or is absent
SKAXXVPTKLSAISILYLXXXXXXXXXLKNYQGMAVSEXG

SEQ ID NO: 80120 - protein, 37 aa, Artificial Sequence; identical to SEQ ID NO: 6941
  GFR-binding peptide
  MOD_RES (2), (3), (35), (37): Xaa is C or S

SEQ ID NO: 80121 - protein, 37 aa, Artificial Sequence
  GFR-binding peptide
  MOD_RES (2), (3), (37): Xaa is C or S
  MOD_RES (17), (18), (19), (20), (21): Xaa is A or G
  MOD_RES (22), (23), (24), (25): Xaa is A or G or is absent
AXXVPTKLSAISILYLXXXXXXXXXLKNYQGMAVSEX

SEQ ID NO: 80122 - protein, 41 aa, Artificial Sequence; identical to SEQ ID NO: 8719
  GFR-binding peptide
  MOD_RES (3), (4), (38), (40): Xaa is C or S
  MOD_RES (18), (19), (20), (21), (22): Xaa is A or G
  MOD_RES (23), (24), (25), (26): Xaa is A or G or is absent

SEQ ID NO: 80123 - protein, 40 aa, Artificial Sequence; identical to SEQ ID NO: 6942
  GFR-binding peptide
  MOD_RES (6), (7): Xaa is C or S
  MOD_RES (21), (22), (23), (24), (25): Xaa is A or G
  MOD_RES (26), (27), (28), (29): Xaa is A or G or is absent

SEQ ID NO: 80124 - protein, 40 aa, Artificial Sequence; identical to SEQ ID NO: 8720
  GFR-binding peptide
  MOD_RES (6), (7): Xaa is C or S
  MOD_RES (21), (22), (23), (24), (25): Xaa is A or G
  MOD_RES (26), (27), (28), (29): Xaa is A or G or is absent

SEQ ID NO: 80125 - protein, 43 aa, Artificial Sequence; identical to SEQ ID NO: 58066
  GFR-binding peptide
  MOD_RES (6), (7), (40), (42): Xaa is C or S
  MOD_RES (21), (22), (23), (24), (25): Xaa is A or G
  MOD_RES (26), (27), (28), (29): Xaa is A or G or is absent

SEQ ID NO: 80126 - protein, 40 aa, Artificial Sequence; identical to SEQ ID NO: 6946
  GFR-binding peptide
  MOD_RES (6), (7), (38), (40): Xaa is C or S

SEQ ID NO: 80127 - protein, 37 aa, Artificial Sequence; identical to SEQ ID NO: 6947
  GFR-binding peptide
  MOD_RES (3), (4): Xaa is C or S
  MOD_RES (18), (19), (20), (21), (22): Xaa is A or G
  MOD_RES (23), (24), (25), (26): Xaa is A or G or is absent

SEQ ID NO: 80128 - protein, 38 aa, Artificial Sequence; identical to SEQ ID NO: 8724
  GFR-binding peptide
  MOD_RES (1), (2), (35), (37): Xaa is C or S

SEQ ID NO: 80129 - protein, 42 aa, Artificial Sequence; identical to SEQ ID NO: 8725
  GFR-binding peptide
  MOD_RES (6), (7), (40), (42): Xaa is C or S

SEQ ID NO: 80130 - protein, 37 aa, Artificial Sequence
  GFR-binding peptide
  MOD_RES (1), (35), (37): Xaa is C or S
  MOD_RES (15), (16), (17), (18), (19): Xaa is A or G
  MOD_RES (20), (21), (22), (23): Xaa is A or G or is absent
XVPARLSAISILYLXXXXXXXXXLKNYQDMVVEAXGX

SEQ ID NO: 80131 - protein, 35 aa, Artificial Sequence
  GFR-binding peptide
  MOD_RES (2), (3): Xaa is C or S
  MOD_RES (17), (18), (19), (20), (21): Xaa is A or G
  MOD_RES (22), (23), (24), (25): Xaa is A or G or is absent
SXXVPARLSAISILYLXXXXXXXXXLKNYQDMVVE

SEQ ID NO: 80132 - protein, 37 aa, Artificial Sequence; identical to SEQ ID NO: 8728
  GFR-binding peptide
  MOD_RES (5), (6): Xaa is C or S

SEQ ID NO: 80133 - protein, 38 aa, Artificial Sequence
  GFR-binding peptide
  MOD_RES (4), (5): Xaa is C or S
  MOD_RES (19), (20), (21), (22), (23): Xaa is A or G
  MOD_RES (24), (25), (26), (27): Xaa is A or G or is absent
PASXXVPARLSAISILYLXXXXXXXXXLKNYQDMVVEA

SEQ ID NO: 80134 - protein, 42 aa, Artificial Sequence
  GFR-binding peptide
  MOD_RES (6), (7), (39), (41): Xaa is C or S
AAPASXXVPARLSAISILYLDAANNVVLKNYQDMVVEAXGXR

SEQ ID NO: 80135 - protein, 40 aa, Artificial Sequence; identical to SEQ ID NO: 6954
  GFR-binding peptide
  MOD_RES (4), (5), (39): Xaa is C or S
  MOD_RES (19), (20), (21), (22), (23): Xaa is A or G
  MOD_RES (24), (25), (26), (27): Xaa is A or G or is absent

SEQ ID NO: 80136 - protein, 37 aa, Artificial Sequence; identical to SEQ ID NO: 6955
  GFR-binding peptide
  MOD_RES (4), (5): Xaa is C or S
  MOD_RES (19), (20), (21), (22), (23): Xaa is A or G
  MOD_RES (24), (25), (26), (27): Xaa is A or G or is absent

SEQ ID NO: 80137 - protein, 39 aa, Artificial Sequence; identical to SEQ ID NO: 6958
  GFR-binding peptide
  MOD_RES (4), (5), (38): Xaa is C or S
  MOD_RES (19), (20), (21), (22), (23): Xaa is A or G
  MOD_RES (24), (25), (26), (27): Xaa is A or G or is absent

SEQ ID NO: 80138 - protein, 33 aa, Artificial Sequence; identical to SEQ ID NO: 6960
  GFR-binding peptide
  MOD_RES (32), (32): Xaa is C or S

SEQ ID NO: 80139 - protein, 37 aa, Artificial Sequence; identical to SEQ ID NO: 6961
  GFR-binding peptide
  MOD_RES (1), (34), (36): Xaa is C or S
  MOD_RES (15), (16), (17), (18), (19): Xaa is A or G
  MOD_RES (20), (21), (22), (23): Xaa is A or G or is absent

SEQ ID NO: 80140 - protein, 42 aa, Artificial Sequence; identical to SEQ ID NO: 30070
  GFR-binding peptide
  MOD_RES (5), (6), (40), (42): Xaa is C or S
  MOD_RES (20), (21), (22), (23), (24): Xaa is A or G
  MOD_RES (25), (26), (27), (28): Xaa is A or G or is absent

SEQ ID NO: 80141 - protein, 40 aa, Artificial Sequence; identical to SEQ ID NO: 6962
  GFR-binding peptide
  MOD_RES (6), (7), (40): Xaa is C or S
  MOD_RES (21), (22), (23), (24), (25): Xaa is A or G
  MOD_RES (26), (27), (28), (29): Xaa is A or G or is absent

SEQ ID NO: 80142 - protein, 37 aa, Artificial Sequence
  GFR-binding peptide
  MOD_RES (2), (3), (35), (37): Xaa is C or S
SXXVPARLSAISILYLDAANNVVLKNYQDMVVEAXGX

SEQ ID NO: 80143 - protein, 38 aa, Artificial Sequence
  GFR-binding peptide
  MOD_RES (3), (4), (36), (38): Xaa is C or S
EPXXVPEKMSAISILYLDENKNVVLKNYQNMTVESXAX

SEQ ID NO: 80144 - protein, 37 aa, Artificial Sequence; identical to SEQ ID NO: 6965
  GFR-binding peptide
  MOD_RES (1), (2), (36): Xaa is C or S
  MOD_RES (16), (17), (18), (19), (20): Xaa is A or G
  MOD_RES (21), (22), (23), (24): Xaa is A or G or is absent

SEQ ID NO: 80145 - protein, 36 aa, Artificial Sequence
  GFR-binding peptide
  MOD_RES (2), (3): Xaa is C or S
  MOD_RES (17), (18), (19), (20), (21): Xaa is A or G
  MOD_RES (22), (23), (24), (25): Xaa is A or G or is absent
AXXVPTKLSAISILYLXXXXXXXXXLKNYQGMAVSE

SEQ ID NO: 80146 - protein, 40 aa, Artificial Sequence; identical to SEQ ID NO: 8737
  GFR-binding peptide
  MOD_RES (6), (7), (39): Xaa is C or S

SEQ ID NO: 80147 - protein, 38 aa, Artificial Sequence
  GFR-binding peptide
  MOD_RES (1), (2), (36), (38): Xaa is C or S
  MOD_RES (16), (17), (18), (19), (20): Xaa is A or G
  MOD_RES (21), (22), (23), (24): Xaa is A or G or is absent
XXVPEKMSAISILYLXXXXXXXXXLKNYQNMTVESXAX

SEQ ID NO: 80148 - protein, 42 aa, Artificial Sequence; identical to SEQ ID NO: 8739
  GFR-binding peptide
  MOD_RES (6), (7), (41): Xaa is C or S
  MOD_RES (21), (22), (23), (24), (25): Xaa is A or G
  MOD_RES (26), (27), (28), (29): Xaa is A or G or is absent

SEQ ID NO: 80149 - protein, 35 aa, Artificial Sequence; identical to SEQ ID NO: 6970
  GFR-binding peptide
  MOD_RES (1), (2): Xaa is C or S
  MOD_RES (16), (17), (18), (19), (20): Xaa is A or G
  MOD_RES (21), (22), (23), (24): Xaa is A or G or is absent

SEQ ID NO: 80150 - protein, 35 aa, Artificial Sequence; identical to SEQ ID NO: 8740
  GFR-binding peptide
  MOD_RES (1), (33), (35): Xaa is C or S

SEQ ID NO: 80151 - protein, 39 aa, Artificial Sequence; identical to SEQ ID NO: 58083
  GFR-binding peptide
  MOD_RES (5), (6), (39): Xaa is C or S
  MOD_RES (20), (21), (22), (23), (24): Xaa is A or G
  MOD_RES (25), (26), (27), (28): Xaa is A or G or is absent

SEQ ID NO: 80152 - protein, 39 aa, Artificial Sequence; identical to SEQ ID NO: 8741
  GFR-binding peptide
  MOD_RES (5), (6): Xaa is C or S
  MOD_RES (20), (21), (22), (23), (24): Xaa is A or G
  MOD_RES (25), (26), (27), (28): Xaa is A or G or is absent

SEQ ID NO: 80153 - protein, 36 aa, Artificial Sequence; identical to SEQ ID NO: 6973
  GFR-binding peptide
  MOD_RES (34), (36): Xaa is C or S
  MOD_RES (14), (15), (16), (17), (18): Xaa is A or G
  MOD_RES (19), (20), (21), (22): Xaa is A or G or is absent

SEQ ID NO: 80154 - protein, 37 aa, Artificial Sequence; identical to SEQ ID NO: 6974
  GFR-binding peptide
  MOD_RES (2), (3), (35), (37): Xaa is C or S

SEQ ID NO: 80155 - protein, 38 aa, Artificial Sequence; identical to SEQ ID NO: 6975
  GFR-binding peptide
  MOD_RES (4), (5): Xaa is C or S
  MOD_RES (19), (20), (21), (22), (23): Xaa is A or G
  MOD_RES (24), (25), (26), (27): Xaa is A or G or is absent

SEQ ID NO: 80156 - protein, 35 aa, Artificial Sequence
  GFR-binding peptide
  MOD_RES (2), (3): Xaa is C or S
  MOD_RES (17), (18), (19), (20), (21): Xaa is A or G
  MOD_RES (22), (23), (24), (25): Xaa is A or G or is absent
PXXTPTKMSAISMLYLXXXXXXXXXLKNYQGMVVD

SEQ ID NO: 80157 - protein, 40 aa, Artificial Sequence; identical to SEQ ID NO: 16037
  GFR-binding peptide
  MOD_RES (4), (5), (37), (39): Xaa is C or S

SEQ ID NO: 80158 - protein, 32 aa, Artificial Sequence; identical to SEQ ID NO: 6976
  GFR-binding peptide
  MOD_RES (14), (15), (16), (17), (18): Xaa is A or G
  MOD_RES (19), (20), (21), (22): Xaa is A or G or is absent

SEQ ID NO: 80159 - protein, 41 aa, Artificial Sequence; identical to SEQ ID NO: 8743
  GFR-binding peptide
  MOD_RES (5), (6), (39), (41): Xaa is C or S
  MOD_RES (20), (21), (22), (23), (24): Xaa is A or G
  MOD_RES (25), (26), (27), (28): Xaa is A or G or is absent

SEQ ID NO: 80160 - protein, 35 aa, Artificial Sequence
  GFR-binding peptide
  MOD_RES (2), (3): Xaa is C or S
  MOD_RES (17), (18), (19), (20), (21): Xaa is A or G
  MOD_RES (22), (23), (24), (25): Xaa is A or G or is absent
AXXVPTKLSAISILYLXXXXXXXXXLKNYQGMAVS

SEQ ID NO: 80161 - protein, 36 aa, Artificial Sequence; identical to SEQ ID NO: 8744
  GFR-binding peptide
  MOD_RES (5), (6): Xaa is C or S

SEQ ID NO: 80162 - protein, 39 aa, Artificial Sequence
  GFR-binding peptide
  MOD_RES (4), (5), (37), (39): Xaa is C or S
PEPXXVPEKMSAISILYLDENKNVVLKNYQNMTVESXAX

SEQ ID NO: 80163 - protein, 33 aa, Artificial Sequence; identical to SEQ ID NO: 6981
  GFR-binding peptide
  MOD_RES (1), (1): Xaa is C or S
  MOD_RES (15), (16), (17), (18), (19): Xaa is A or G
  MOD_RES (20), (21), (22), (23): Xaa is A or G or is absent

SEQ ID NO: 80164 - protein, 38 aa, Artificial Sequence; identical to SEQ ID NO: 8750
  GFR-binding peptide
  MOD_RES (2), (3), (37): Xaa is C or S
  MOD_RES (17), (18), (19), (20), (21): Xaa is A or G
  MOD_RES (22), (23), (24), (25): Xaa is A or G or is absent

SEQ ID NO: 80165 - protein, 42 aa, Artificial Sequence; identical to SEQ ID NO: 8751
  GFR-binding peptide
  MOD_RES (6), (7), (39), (41): Xaa is C or S

SEQ ID NO: 80166 - protein, 36 aa, Artificial Sequence
  GFR-binding peptide
  MOD_RES (1), (34), (36): Xaa is C or S
  MOD_RES (15), (16), (17), (18), (19): Xaa is A or G
  MOD_RES (20), (21), (22), (23): Xaa is A or G or is absent
XAPVKTSAISMLYLXXXXXXXXXLKNYQMIVEEXGX

SEQ ID NO: 80167 - protein, 36 aa, Artificial Sequence; identical to SEQ ID NO: 58090
  GFR-binding peptide
  MOD_RES (1), (33), (35): Xaa is C or S

SEQ ID NO: 80168 - protein, 34 aa, Artificial Sequence; identical to SEQ ID NO: 6984
  GFR-binding peptide
  MOD_RES (3), (4): Xaa is C or S

SEQ ID NO: 80169 - protein, 36 aa, Artificial Sequence; identical to SEQ ID NO: 8752
  GFR-binding peptide
  MOD_RES (3), (4), (36): Xaa is C or S

SEQ ID NO: 80170 - protein, 32 aa, Artificial Sequence; identical to SEQ ID NO: 58092
  GFR-binding peptide
  MOD_RES (1), (2): Xaa is C or S

SEQ ID NO: 80171 - protein, 34 aa, Artificial Sequence; identical to SEQ ID NO: 16051
  GFR-binding peptide
  MOD_RES (1), (2), (34): Xaa is C or S

SEQ ID NO: 80172 - protein, 34 aa, Artificial Sequence
  GFR-binding peptide
  MOD_RES (31), (33): Xaa is C or S
APVKTSAISMLYLDNGRVLLLKNYQMIVEEXGXL

SEQ ID NO: 80173 - protein, 31 aa, Artificial Sequence; identical to SEQ ID NO: 6986
  GFR-binding peptide
  MOD_RES (1), (1): Xaa is C or S

SEQ ID NO: 80174 - protein, 32 aa, Artificial Sequence
  GFR-binding peptide
  MOD_RES (1), (32): Xaa is C or S
XAPVKTSAISMLYLDNGRVLLLKNYQMIVEEX

SEQ ID NO: 80175 - protein, 41 aa, Artificial Sequence; identical to SEQ ID NO: 8753
  GFR-binding peptide
  MOD_RES (5), (6), (41): Xaa is C or S
  MOD_RES (20), (21), (22), (23), (24): Xaa is A or G
  MOD_RES (25), (26), (27), (28): Xaa is A or G or is absent

SEQ ID NO: 80176 - protein, 35 aa, Artificial Sequence; identical to SEQ ID NO: 8757
  GFR-binding peptide
  MOD_RES (1), (2), (33), (35): Xaa is C or S

SEQ ID NO: 80177 - protein, 40 aa, Artificial Sequence; identical to SEQ ID NO: 28163
  GFR-binding peptide
  MOD_RES (6), (7): Xaa is C or S
  MOD_RES (21), (22), (23), (24), (25): Xaa is A or G
  MOD_RES (26), (27), (28), (29): Xaa is A or G or is absent

SEQ ID NO: 80178 - protein, 35 aa, Artificial Sequence; identical to SEQ ID NO: 30107
  GFR-binding peptide
  MOD_RES (3), (4): Xaa is C or S

SEQ ID NO: 80179 - protein, 37 aa, Artificial Sequence
  GFR-binding peptide
  MOD_RES (3), (4), (36): Xaa is C or S
EPXXVPEKMSAISILYLDENKNVVLKNYQNMTVESXA

SEQ ID NO: 80180 - protein, 36 aa, Artificial Sequence; identical to SEQ ID NO: 69374
  GFR-binding peptide
  MOD_RES (3), (4): Xaa is C or S
  MOD_RES (18), (19), (20), (21), (22): Xaa is A or G
  MOD_RES (23), (24), (25), (26): Xaa is A or G or is absent

SEQ ID NO: 80181 - protein, 42 aa, Artificial Sequence; identical to SEQ ID NO: 8761
  GFR-binding peptide
  MOD_RES (6), (7), (41): Xaa is C or S
  MOD_RES (21), (22), (23), (24), (25): Xaa is A or G
  MOD_RES (26), (27), (28), (29): Xaa is A or G or is absent

SEQ ID NO: 80182 - protein, 39 aa, Artificial Sequence
  GFR-binding peptide
  MOD_RES (4), (5), (37), (39): Xaa is C or S
SKAXXVPTKLSAISILYLDKGVVTYLKNYQGMAVSEXGX

SEQ ID NO: 80183 - protein, 38 aa, Artificial Sequence; identical to SEQ ID NO: 8762
  GFR-binding peptide
  MOD_RES (1), (2), (36), (38): Xaa is C or S
  MOD_RES (16), (17), (18), (19), (20): Xaa is A or G
  MOD_RES (21), (22), (23), (24): Xaa is A or G or is absent

SEQ ID NO: 80184 - protein, 38 aa, Artificial Sequence; identical to SEQ ID NO: 6993
  GFR-binding peptide
  MOD_RES (6), (7): Xaa is C or S

SEQ ID NO: 80185 - protein, 38 aa, Artificial Sequence; identical to SEQ ID NO: 8763
  GFR-binding peptide
  MOD_RES (6), (7): Xaa is C or S

SEQ ID NO: 80186 - protein, 34 aa, Artificial Sequence; identical to SEQ ID NO: 67656
  GFR-binding peptide
  MOD_RES (32), (34): Xaa is C or S

SEQ ID NO: 80187 - protein, 34 aa, Artificial Sequence; identical to SEQ ID NO: 30119
  GFR-binding peptide
  MOD_RES (1), (2), (34): Xaa is C or S

SEQ ID NO: 80188 - protein, 36 aa, Artificial Sequence; identical to SEQ ID NO: 8768
  GFR-binding peptide
  MOD_RES (2), (3): Xaa is C or S
  MOD_RES (17), (18), (19), (20), (21): Xaa is A or G
  MOD_RES (22), (23), (24), (25): Xaa is A or G or is absent

SEQ ID NO: 80189 - protein, 33 aa, Artificial Sequence; identical to SEQ ID NO: 6998
  GFR-binding peptide
  MOD_RES (14), (15), (16), (17), (18): Xaa is A or G
  MOD_RES (19), (20), (21), (22): Xaa is A or G or is absent

SEQ ID NO: 80190 - protein, 39 aa, Artificial Sequence
  GFR-binding peptide
  MOD_RES (5), (6): Xaa is C or S
  MOD_RES (20), (21), (22), (23), (24): Xaa is A or G
  MOD_RES (25), (26), (27), (28): Xaa is A or G or is absent
APASXXVPARLSAISILYLXXXXXXXXXLKNYQDMVVEA

SEQ ID NO: 80191 - protein, 38 aa, Artificial Sequence; identical to SEQ ID NO: 8772
  GFR-binding peptide
  MOD_RES (2), (3), (35), (37): Xaa is C or S

SEQ ID NO: 80192 - protein, 36 aa, Artificial Sequence; identical to SEQ ID NO: 16070
  GFR-binding peptide
  MOD_RES (4), (5): Xaa is C or S

SEQ ID NO: 80193 - protein, 36 aa, Artificial Sequence; identical to SEQ ID NO: 8778
  GFR-binding peptide
  MOD_RES (4), (5), (36): Xaa is C or S

SEQ ID NO: 80194 - protein, 36 aa, Artificial Sequence
  GFR-binding peptide
  MOD_RES (1), (33), (35): Xaa is C or S
XVPEKMSAISILYLDENKNVVLKNYQNMTVESXAXR

SEQ ID NO: 80195 - protein, 44 aa, Artificial Sequence
  GFR-binding peptide
  MOD_RES (6), (7), (41), (43): Xaa is C or S
  MOD_RES (21), (22), (23), (24), (25): Xaa is A or G
  MOD_RES (26), (27), (28), (29): Xaa is A or G or is absent
HVPKPXXAPTKLSAISVLYLXXXXXXXXXLKNYQNMVVRSXGXH

SEQ ID NO: 80196 - protein, 35 aa, Artificial Sequence; identical to SEQ ID NO: 58107
  GFR-binding peptide
  MOD_RES (1), (33), (35): Xaa is C or S

SEQ ID NO: 80197 - protein, 35 aa, Artificial Sequence; identical to SEQ ID NO: 7006
  GFR-binding peptide
  MOD_RES (33), (35): Xaa is C or S
  MOD_RES (14), (15), (16), (17), (18): Xaa is A or G
  MOD_RES (19), (20), (21), (22): Xaa is A or G or is absent

SEQ ID NO: 80198 - protein, 36 aa, Artificial Sequence; identical to SEQ ID NO: 7007
  GFR-binding peptide
  MOD_RES (1), (2), (33), (35): Xaa is C or S

SEQ ID NO: 80199 - protein, 40 aa, Artificial Sequence; identical to SEQ ID NO: 7008
  GFR-binding peptide
  MOD_RES (3), (4), (37), (39): Xaa is C or S

SEQ ID NO: 80200 - protein, 37 aa, Artificial Sequence
  GFR-binding peptide
  MOD_RES (1), (2), (34), (36): Xaa is C or S
XXVPTKLSAISILYLDKGVVTYLKNYQGMAVSEXGXR

SEQ ID NO: 80201 - protein, 40 aa, Artificial Sequence; identical to SEQ ID NO: 58114
  GFR-binding peptide
  MOD_RES (6), (7), (38), (40): Xaa is C or S

SEQ ID NO: 80202 - protein, 38 aa, Artificial Sequence; identical to SEQ ID NO: 8782
  GFR-binding peptide
  MOD_RES (3), (4), (38): Xaa is C or S
  MOD_RES (18), (19), (20), (21), (22): Xaa is A or G
  MOD_RES (23), (24), (25), (26): Xaa is A or G or is absent

SEQ ID NO: 80203 - protein, 34 aa, Artificial Sequence; identical to SEQ ID NO: 7010
  GFR-binding peptide
  MOD_RES (2), (3), (34): Xaa is C or S

SEQ ID NO: 80204 - protein, 33 aa, Artificial Sequence; identical to SEQ ID NO: 7011
  GFR-binding peptide
  MOD_RES (1), (1): Xaa is C or S
  MOD_RES (15), (16), (17), (18), (19): Xaa is A or G
  MOD_RES (20), (21), (22), (23): Xaa is A or G or is absent

SEQ ID NO: 80205 - protein, 38 aa, Artificial Sequence; identical to SEQ ID NO: 8783
  GFR-binding peptide
  MOD_RES (5), (6): Xaa is C or S
  MOD_RES (20), (21), (22), (23), (24): Xaa is A or G
  MOD_RES (25), (26), (27), (28): Xaa is A or G or is absent

SEQ ID NO: 80206 - protein, 35 aa, Artificial Sequence; identical to SEQ ID NO: 8784
  GFR-binding peptide
  MOD_RES (5), (5): Xaa is C or S

SEQ ID NO: 80207 - protein, 30 aa, Artificial Sequence; identical to SEQ ID NO: 8785
  GFR-binding peptide

SEQ ID NO: 80208 - protein, 34 aa, Artificial Sequence
  GFR-binding peptide
  MOD_RES (32), (34): Xaa is C or S
VPARLSAISILYLDAANNVVLKNYQDMVVEAXGX

SEQ ID NO: 80209 - protein, 35 aa, Artificial Sequence; identical to SEQ ID NO: 14348
  GFR-binding peptide
  MOD_RES (1), (33), (35): Xaa is C or S

SEQ ID NO: 80210 - protein, 39 aa, Artificial Sequence; identical to SEQ ID NO: 7015
  GFR-binding peptide
  MOD_RES (3), (4), (37), (39): Xaa is C or S
  MOD_RES (18), (19), (20), (21), (22): Xaa is A or G
  MOD_RES (23), (24), (25), (26): Xaa is A or G or is absent

SEQ ID NO: 80211 - protein, 37 aa, Artificial Sequence; identical to SEQ ID NO: 7017
  GFR-binding peptide
  MOD_RES (1), (2), (34), (36): Xaa is C or S

SEQ ID NO: 80212 - protein, 37 aa, Artificial Sequence
  GFR-binding peptide
  MOD_RES (34), (36): Xaa is C or S
  MOD_RES (14), (15), (16), (17), (18): Xaa is A or G
  MOD_RES (19), (20), (21), (22): Xaa is A or G or is absent
VPEKMSAISILYLXXXXXXXXXLKNYQNMTVESXAXR

SEQ ID NO: 80213 - protein, 40 aa, Artificial Sequence; identical to SEQ ID NO: 16084
  GFR-binding peptide
  MOD_RES (5), (6), (38), (40): Xaa is C or S

SEQ ID NO: 80214 - protein, 36 aa, Artificial Sequence; identical to SEQ ID NO: 30139
  GFR-binding peptide
  MOD_RES (2), (3), (35): Xaa is C or S

SEQ ID NO: 80215 - protein, 36 aa, Artificial Sequence; identical to SEQ ID NO: 7018
  GFR-binding peptide
  MOD_RES (2), (3), (36): Xaa is C or S

SEQ ID NO: 80216 - protein, 34 aa, Artificial Sequence; identical to SEQ ID NO: 28197
  GFR-binding peptide
  MOD_RES (1), (33): Xaa is C or S

SEQ ID NO: 80217 - protein, 35 aa, Artificial Sequence
  GFR-binding peptide
  MOD_RES (4), (5): Xaa is C or S
PSTXXAPVKTSAISMLYLDNGRVLLLKNYQMIVEE

SEQ ID NO: 80218 - protein, 35 aa, Artificial Sequence; identical to SEQ ID NO: 8792
  GFR-binding peptide
  MOD_RES (33), (35): Xaa is C or S

SEQ ID NO: 80219 - protein, 36 aa, Artificial Sequence; identical to SEQ ID NO: 8793
  GFR-binding peptide
  MOD_RES (5), (6): Xaa is C or S

SEQ ID NO: 80220 - protein, 34 aa, Artificial Sequence; identical to SEQ ID NO: 7020
  GFR-binding peptide
  MOD_RES (34), (34): Xaa is C or S
  MOD_RES (14), (15), (16), (17), (18): Xaa is A or G
  MOD_RES (19), (20), (21), (22): Xaa is A or G or is absent

SEQ ID NO: 80221 - protein, 41 aa, Artificial Sequence; identical to SEQ ID NO: 7021
  GFR-binding peptide
  MOD_RES (4), (38), (40): Xaa is C or S
  MOD_RES (18), (19), (20), (21), (22): Xaa is A or G
  MOD_RES (23), (24), (25), (26): Xaa is A or G or is absent

SEQ ID NO: 80222 - protein, 32 aa, Artificial Sequence; identical to SEQ ID NO: 8795
  GFR-binding peptide
  MOD_RES (1), (2): Xaa is C or S

SEQ ID NO: 80223 - protein, 43 aa, Artificial Sequence; identical to SEQ ID NO: 16089
  GFR-binding peptide
  MOD_RES (5), (6), (40), (42): Xaa is C or S
  MOD_RES (20), (21), (22), (23), (24): Xaa is A or G
  MOD_RES (25), (26), (27), (28): Xaa is A or G or is absent

SEQ ID NO: 80224 - protein, 37 aa, Artificial Sequence
  GFR-binding peptide
  MOD_RES (3), (4), (36): Xaa is C or S
KAXXVPTKLSAISILYLDKGVVTYLKNYQGMAVSEXG

SEQ ID NO: 80225 - protein, 39 aa, Artificial Sequence; identical to SEQ ID NO: 16090
  GFR-binding peptide
  MOD_RES (5), (6), (38): Xaa is C or S

SEQ ID NO: 80226 - protein, 36 aa, Artificial Sequence; identical to SEQ ID NO: 7025
  GFR-binding peptide
  MOD_RES (1), (2), (34), (36): Xaa is C or S

SEQ ID NO: 80227 - protein, 42 aa, Artificial Sequence; identical to SEQ ID NO: 7026
  GFR-binding peptide
  MOD_RES (4), (5), (39), (41): Xaa is C or S
  MOD_RES (19), (20), (21), (22), (23): Xaa is A or G
  MOD_RES (24), (25), (26), (27): Xaa is A or G or is absent

SEQ ID NO: 80228 - protein, 35 aa, Artificial Sequence; identical to SEQ ID NO: 66001
  GFR-binding peptide
  MOD_RES (34), (34): Xaa is C or S
  MOD_RES (14), (15), (16), (17), (18): Xaa is A or G
  MOD_RES (19), (20), (21), (22): Xaa is A or G or is absent

SEQ ID NO: 80229 - protein, 34 aa, Artificial Sequence; identical to SEQ ID NO: 7028
  GFR-binding peptide
  MOD_RES (1), (34): Xaa is C or S
  MOD_RES (15), (16), (17), (18), (19): Xaa is A or G
  MOD_RES (20), (21), (22), (23): Xaa is A or G or is absent

SEQ ID NO: 80230 - protein, 41 aa, Artificial Sequence; identical to SEQ ID NO: 7031
  GFR-binding peptide
  MOD_RES (5), (6), (39), (41): Xaa is C or S
  MOD_RES (20), (21), (22), (23), (24): Xaa is A or G
  MOD_RES (25), (26), (27), (28): Xaa is A or G or is absent

SEQ ID NO: 80231 - protein, 36 aa, Artificial Sequence; identical to SEQ ID NO: 8800
  GFR-binding peptide
  MOD_RES (3), (4): Xaa is C or S
  MOD_RES (18), (19), (20), (21), (22): Xaa is A or G
  MOD_RES (23), (24), (25), (26): Xaa is A or G or is absent

SEQ ID NO: 80232 - protein, 39 aa, Artificial Sequence; identical to SEQ ID NO: 30153
  GFR-binding peptide
  MOD_RES (3), (4), (36), (38): Xaa is C or S

SEQ ID NO: 80233 - protein, 34 aa, Artificial Sequence; identical to SEQ ID NO: 8802
  GFR-binding peptide
  MOD_RES (1), (2): Xaa is C or S
  MOD_RES (16), (17), (18), (19), (20): Xaa is A or G
  MOD_RES (21), (22), (23), (24): Xaa is A or G or is absent

SEQ ID NO: 80234 - protein, 42 aa, Artificial Sequence; identical to SEQ ID NO: 7037
  GFR-binding peptide
  MOD_RES (6), (40), (42): Xaa is C or S
  MOD_RES (20), (21), (22), (23), (24): Xaa is A or G
  MOD_RES (25), (26), (27), (28): Xaa is A or G or is absent

SEQ ID NO: 80235 - protein, 38 aa, Artificial Sequence; identical to SEQ ID NO: 7039
  GFR-binding peptide
  MOD_RES (5), (6): Xaa is C or S

SEQ ID NO: 80236 - protein, 44 aa, Artificial Sequence; identical to SEQ ID NO: 8808
  GFR-binding peptide
  MOD_RES (6), (7), (41), (43): Xaa is C or S
  MOD_RES (21), (22), (23), (24), (25): Xaa is A or G
  MOD_RES (26), (27), (28), (29): Xaa is A or G or is absent

SEQ ID NO: 80237 - protein, 42 aa, Artificial Sequence; identical to SEQ ID NO: 8809
  GFR-binding peptide
  MOD_RES (5), (6), (39), (41): Xaa is C or S
  MOD_RES (20), (21), (22), (23), (24): Xaa is A or G
  MOD_RES (25), (26), (27), (28): Xaa is A or G or is absent

SEQ ID NO: 80238 - protein, 37 aa, Artificial Sequence; identical to SEQ ID NO: 8810
  GFR-binding peptide
  MOD_RES (5), (6): Xaa is C or S

SEQ ID NO: 80239 - protein, 39 aa, Artificial Sequence; identical to SEQ ID NO: 7043
  GFR-binding peptide
  MOD_RES (5), (6): Xaa is C or S
  MOD_RES (20), (21), (22), (23), (24): Xaa is A or G
  MOD_RES (25), (26), (27), (28): Xaa is A or G or is absent

SEQ ID NO: 80240 - protein, 34 aa, Artificial Sequence; identical to SEQ ID NO: 7044
  GFR-binding peptide
  MOD_RES (1), (2): Xaa is C or S
  MOD_RES (16), (17), (18), (19), (20): Xaa is A or G
  MOD_RES (21), (22), (23), (24): Xaa is A or G or is absent

SEQ ID NO: 80241 - protein, 40 aa, Artificial Sequence; identical to SEQ ID NO: 7045
  GFR-binding peptide
  MOD_RES (4), (5), (37), (39): Xaa is C or S

SEQ ID NO: 80242 - protein, 43 aa, Artificial Sequence; identical to SEQ ID NO: 8813
  GFR-binding peptide
  MOD_RES (6), (7), (41), (43): Xaa is C or S
  MOD_RES (21), (22), (23), (24), (25): Xaa is A or G
  MOD_RES (26), (27), (28), (29): Xaa is A or G or is absent

SEQ ID NO: 80243 - protein, 32 aa, Artificial Sequence; identical to SEQ ID NO: 8814
  GFR-binding peptide
  MOD_RES (14), (15), (16), (17), (18): Xaa is A or G
  MOD_RES (19), (20), (21), (22): Xaa is A or G or is absent

SEQ ID NO: 80244 - protein, 37 aa, Artificial Sequence; identical to SEQ ID NO: 7046
  GFR-binding peptide
  MOD_RES (3), (37): Xaa is C or S
  MOD_RES (17), (18), (19), (20), (21): Xaa is A or G
  MOD_RES (22), (23), (24), (25): Xaa is A or G or is absent

SEQ ID NO: 80245 - protein, 40 aa, Artificial Sequence; identical to SEQ ID NO: 30166
  GFR-binding peptide
  MOD_RES (2), (3), (37), (39): Xaa is C or S
  MOD_RES (17), (18), (19), (20), (21): Xaa is A or G
  MOD_RES (22), (23), (24), (25): Xaa is A or G or is absent

SEQ ID NO: 80246 - protein, 36 aa, Artificial Sequence
  GFR-binding peptide
  MOD_RES (2), (3), (35): Xaa is C or S
PXXTPTKMSAISMLYLNDKQQIILKNYQGMVVDRXG

SEQ ID NO: 80247 - protein, 39 aa, Artificial Sequence; identical to SEQ ID NO: 16116
  GFR-binding peptide
  MOD_RES (6), (7), (39): Xaa is C or S

SEQ ID NO: 80248 - protein, 38 aa, Artificial Sequence; identical to SEQ ID NO: 8816
  GFR-binding peptide
  MOD_RES (4), (5), (37): Xaa is C or S

SEQ ID NO: 80249 - protein, 33 aa, Artificial Sequence; identical to SEQ ID NO: 8817
  GFR-binding peptide
  MOD_RES (14), (15), (16), (17), (18): Xaa is A or G
  MOD_RES (19), (20), (21), (22): Xaa is A or G or is absent

SEQ ID NO: 80250 - protein, 32 aa, Artificial Sequence; identical to SEQ ID NO: 8818
  GFR-binding peptide
  MOD_RES (32), (32): Xaa is C or S

SEQ ID NO: 80251 - protein, 40 aa, Artificial Sequence; identical to SEQ ID NO: 8819
  GFR-binding peptide
  MOD_RES (2), (3), (37), (39): Xaa is C or S
  MOD_RES (17), (18), (19), (20), (21): Xaa is A or G
  MOD_RES (22), (23), (24), (25): Xaa is A or G or is absent

SEQ ID NO: 80252 - protein, 37 aa, Artificial Sequence; identical to SEQ ID NO: 14374
  GFR-binding peptide
  MOD_RES (4), (5), (37): Xaa is C or S

SEQ ID NO: 80253 - protein, 36 aa, Artificial Sequence; identical to SEQ ID NO: 71086
  GFR-binding peptide
  MOD_RES (4), (5): Xaa is C or S

SEQ ID NO: 80254 - protein, 39 aa, Artificial Sequence; identical to SEQ ID NO: 14375
  GFR-binding peptide
  MOD_RES (6), (7): Xaa is C or S
  MOD_RES (21), (22), (23), (24), (25): Xaa is A or G
  MOD_RES (26), (27), (28), (29): Xaa is A or G or is absent

SEQ ID NO: 80255 - protein, 38 aa, Artificial Sequence
  GFR-binding peptide
  MOD_RES (4), (5), (36), (38): Xaa is C or S
PSTXXAPVKTSAISMLYLDNGRVLLLKNYQMIVEEXGX

SEQ ID NO: 80256 - protein, 32 aa, Artificial Sequence; identical to SEQ ID NO: 28230
  GFR-binding peptide
  MOD_RES (1), (1): Xaa is C or S

SEQ ID NO: 80257 - protein, 36 aa, Artificial Sequence; identical to SEQ ID NO: 58158
  GFR-binding peptide
  MOD_RES (1), (2), (36): Xaa is C or S
  MOD_RES (16), (17), (18), (19), (20): Xaa is A or G
  MOD_RES (21), (22), (23), (24): Xaa is A or G or is absent

SEQ ID NO: 80258 - protein, 30 aa, Artificial Sequence
  GFR-binding peptide
VPEKMSAISILYLDENKNVVLKNYQNMTVE

SEQ ID NO: 80259 - protein, 35 aa, Artificial Sequence; identical to SEQ ID NO: 7052
  GFR-binding peptide
  MOD_RES (1), (2), (35): Xaa is C or S

SEQ ID NO: 80260 - protein, 40 aa, Artificial Sequence; identical to SEQ ID NO: 7053
  GFR-binding peptide
  MOD_RES (5), (6), (38), (40): Xaa is C or S

SEQ ID NO: 80261 - protein, 40 aa, Artificial Sequence
  GFR-binding peptide
  MOD_RES (6), (7), (39): Xaa is C or S
GIPEPXXVPEKMSAISILYLDENKNVVLKNYQNMTVESXA

SEQ ID NO: 80262 - protein, 37 aa, Artificial Sequence; identical to SEQ ID NO: 7055
  GFR-binding peptide
  MOD_RES (1), (2), (36): Xaa is C or S
  MOD_RES (16), (17), (18), (19), (20): Xaa is A or G
  MOD_RES (21), (22), (23), (24): Xaa is A or G or is absent

SEQ ID NO: 80263 - protein, 33 aa, Artificial Sequence; identical to SEQ ID NO: 69428
  GFR-binding peptide
  MOD_RES (1), (33): Xaa is C or S

SEQ ID NO: 80264 - protein, 34 aa, Artificial Sequence
  GFR-binding peptide
  MOD_RES (1), (2): Xaa is C or S
  MOD_RES (16), (17), (18), (19), (20): Xaa is A or G
  MOD_RES (21), (22), (23), (24): Xaa is A or G or is absent
XXVPTKLSAISILYLXXXXXXXXXLKNYQGMAVS

SEQ ID NO: 80265 - protein, 37 aa, Artificial Sequence; identical to SEQ ID NO: 8820
  GFR-binding peptide
  MOD_RES (6), (7): Xaa is C or S

SEQ ID NO: 80266 - protein, 33 aa, Artificial Sequence
  GFR-binding peptide
  MOD_RES (32), (32): Xaa is C or S
VPEKMSAISILYLDENKNVVLKNYQNMTVESXA

SEQ ID NO: 80267 - protein, 40 aa, Artificial Sequence; identical to SEQ ID NO: 16128
  GFR-binding peptide
  MOD_RES (3), (4), (38), (40): Xaa is C or S
  MOD_RES (18), (19), (20), (21), (22): Xaa is A or G
  MOD_RES (23), (24), (25), (26): Xaa is A or G or is absent

SEQ ID NO: 80268 - protein, 34 aa, Artificial Sequence; identical to SEQ ID NO: 69433
  GFR-binding peptide
  MOD_RES (1), (2), (34): Xaa is C or S

SEQ ID NO: 80269 - protein, 39 aa, Artificial Sequence; identical to SEQ ID NO: 8823
  GFR-binding peptide
  MOD_RES (6), (7), (39): Xaa is C or S

SEQ ID NO: 80270 - protein, 36 aa, Artificial Sequence; identical to SEQ ID NO: 8824
  GFR-binding peptide
  MOD_RES (1), (2), (33), (35): Xaa is C or S

SEQ ID NO: 80271 - protein, 43 aa, Artificial Sequence; identical to SEQ ID NO: 7061
  GFR-binding peptide
  MOD_RES (6), (7), (40), (42): Xaa is C or S
  MOD_RES (21), (22), (23), (24), (25): Xaa is A or G
  MOD_RES (26), (27), (28), (29): Xaa is A or G or is absent

SEQ ID NO: 80272 - protein, 42 aa, Artificial Sequence; identical to SEQ ID NO: 7063
  GFR-binding peptide
  MOD_RES (6), (7), (39), (41): Xaa is C or S

SEQ ID NO: 80273 - protein, 37 aa, Artificial Sequence; identical to SEQ ID NO: 8825
  GFR-binding peptide
  MOD_RES (3), (4): Xaa is C or S
  MOD_RES (18), (19), (20), (21), (22): Xaa is A or G
  MOD_RES (23), (24), (25), (26): Xaa is A or G or is absent

SEQ ID NO: 80274 - protein, 41 aa, Artificial Sequence; identical to SEQ ID NO: 8826
  GFR-binding peptide
  MOD_RES (4), (5), (39), (41): Xaa is C or S
  MOD_RES (19), (20), (21), (22), (23): Xaa is A or G
  MOD_RES (24), (25), (26), (27): Xaa is A or G or is absent

SEQ ID NO: 80275 - protein, 34 aa, Artificial Sequence; identical to SEQ ID NO: 7066
  GFR-binding peptide
  MOD_RES (34), (34): Xaa is C or S
  MOD_RES (14), (15), (16), (17), (18): Xaa is A or G
  MOD_RES (19), (20), (21), (22): Xaa is A or G or is absent

SEQ ID NO: 80276 - protein, 41 aa, Artificial Sequence; identical to SEQ ID NO: 8827
  GFR-binding peptide
  MOD_RES (5), (6), (40): Xaa is C or S
  MOD_RES (20), (21), (22), (23), (24): Xaa is A or G
  MOD_RES (25), (26), (27), (28): Xaa is A or G or is absent

SEQ ID NO: 80277 - protein, 31 aa, Artificial Sequence; identical to SEQ ID NO: 8828
  GFR-binding peptide
  MOD_RES (1), (1): Xaa is C or S

SEQ ID NO: 80278 - protein, 36 aa, Artificial Sequence
  GFR-binding peptide
  MOD_RES (2), (3): Xaa is C or S
  MOD_RES (17), (18), (19), (20), (21): Xaa is A or G
  MOD_RES (22), (23), (24), (25): Xaa is A or G or is absent
PXXTPTKMSAISMLYLXXXXXXXXXLKNYQGMVVDR

SEQ ID NO: 80279 - protein, 33 aa, Artificial Sequence; identical to SEQ ID NO: 16137
  GFR-binding peptide
  MOD_RES (2), (3): Xaa is C or S

SEQ ID NO: 80280 - protein, 38 aa, Artificial Sequence; identical to SEQ ID NO: 8829
  GFR-binding peptide
  MOD_RES (6), (7): Xaa is C or S

SEQ ID NO: 80281 - protein, 42 aa, Artificial Sequence; identical to SEQ ID NO: 7070
  GFR-binding peptide
  MOD_RES (4), (5), (39), (41): Xaa is C or S
  MOD_RES (19), (20), (21), (22), (23): Xaa is A or G
  MOD_RES (24), (25), (26), (27): Xaa is A or G or is absent

SEQ ID NO: 80282 - protein, 36 aa, Artificial Sequence
  GFR-binding peptide
  MOD_RES (5), (6): Xaa is C or S
VPSTXXAPVKTSAISMLYLDNGRVLLLKNYQMIVEE

SEQ ID NO: 80283 - protein, 36 aa, Artificial Sequence; identical to SEQ ID NO: 8830
  GFR-binding peptide
  MOD_RES (2), (3), (35): Xaa is C or S

SEQ ID NO: 80284 - protein, 39 aa, Artificial Sequence
  GFR-binding peptide
  MOD_RES (4), (5), (39): Xaa is C or S
  MOD_RES (19), (20), (21), (22), (23): Xaa is A or G
  MOD_RES (24), (25), (26), (27): Xaa is A or G or is absent
AGPXXTPTKMSAISMLYLXXXXXXXXXLKNYQGMVVDRX

SEQ ID NO: 80285 - protein, 33 aa, Artificial Sequence; identical to SEQ ID NO: 7073
  GFR-binding peptide
  MOD_RES (1), (2), (33): Xaa is C or S

SEQ ID NO: 80286 - protein, 42 aa, Artificial Sequence; identical to SEQ ID NO: 8834
  GFR-binding peptide
  MOD_RES (7), (41): Xaa is C or S
  MOD_RES (21), (22), (23), (24), (25): Xaa is A or G
  MOD_RES (26), (27), (28), (29): Xaa is A or G or is absent

SEQ ID NO: 80287 - protein, 36 aa, Artificial Sequence; identical to SEQ ID NO: 30195
  GFR-binding peptide
  MOD_RES (1), (2), (34), (36): Xaa is C or S

SEQ ID NO: 80288 - protein, 33 aa, Artificial Sequence; identical to SEQ ID NO: 58172
  GFR-binding peptide
  MOD_RES (1), (1): Xaa is C or S
  MOD_RES (15), (16), (17), (18), (19): Xaa is A or G
  MOD_RES (20), (21), (22), (23): Xaa is A or G or is absent

SEQ ID NO: 80289 - protein, 38 aa, Artificial Sequence; identical to SEQ ID NO: 8838
  GFR-binding peptide
  MOD_RES (5), (6): Xaa is C or S
  MOD_RES (20), (21), (22), (23), (24): Xaa is A or G
  MOD_RES (25), (26), (27), (28): Xaa is A or G or is absent

SEQ ID NO: 80290 - protein, 33 aa, Artificial Sequence; identical to SEQ ID NO: 7076
  GFR-binding peptide
  MOD_RES (1), (1): Xaa is C or S

SEQ ID NO: 80291 - protein, 43 aa, Artificial Sequence; identical to SEQ ID NO: 8839
  GFR-binding peptide
  MOD_RES (6), (40), (42): Xaa is C or S
  MOD_RES (20), (21), (22), (23), (24): Xaa is A or G
  MOD_RES (25), (26), (27), (28): Xaa is A or G or is absent

SEQ ID NO: 80292 - protein, 37 aa, Artificial Sequence; identical to SEQ ID NO: 58174
  GFR-binding peptide
  MOD_RES (1), (2), (35), (37): Xaa is C or S
  MOD_RES (16), (17), (18), (19), (20): Xaa is A or G
  MOD_RES (21), (22), (23), (24): Xaa is A or G or is absent

SEQ ID NO: 80293 - protein, 33 aa, Artificial Sequence; identical to SEQ ID NO: 7080
  GFR-binding peptide
  MOD_RES (2), (3): Xaa is C or S

SEQ ID NO: 80294 - protein, 41 aa, Artificial Sequence; identical to SEQ ID NO: 8841
  GFR-binding peptide
  MOD_RES (3), (4), (38), (40): Xaa is C or S
  MOD_RES (18), (19), (20), (21), (22): Xaa is A or G
  MOD_RES (23), (24), (25), (26): Xaa is A or G or is absent

SEQ ID NO: 80295 - protein, 37 aa, Artificial Sequence; identical to SEQ ID NO: 8842
  GFR-binding peptide
  MOD_RES (3), (4): Xaa is C or S
  MOD_RES (18), (19), (20), (21), (22): Xaa is A or G
  MOD_RES (23), (24), (25), (26): Xaa is A or G or is absent

SEQ ID NO: 80296 - protein, 33 aa, Artificial Sequence; identical to SEQ ID NO: 7082
  GFR-binding peptide
  MOD_RES (2), (3): Xaa is C or S

SEQ ID NO: 80297 - protein, 38 aa, Artificial Sequence; identical to SEQ ID NO: 58177
  GFR-binding peptide
  MOD_RES (2), (3), (35), (37): Xaa is C or S

SEQ ID NO: 80298 - protein, 32 aa, Artificial Sequence; identical to SEQ ID NO: 8845
  GFR-binding peptide
  MOD_RES (1), (2): Xaa is C or S

SEQ ID NO: 80299 - protein, 31 aa, Artificial Sequence
  GFR-binding peptide
  MOD_RES (31), (31): Xaa is C or S
APVKTSAISMLYLDNGRVLLLKNYQMIVEEX

SEQ ID NO: 80300 - protein, 30 aa, Artificial Sequence; identical to SEQ ID NO: 8847
  GFR-binding peptide

SEQ ID NO: 80301 - protein, 32 aa, Artificial Sequence; identical to SEQ ID NO: 7087
  GFR-binding peptide
  MOD_RES (31), (31): Xaa is C or S

SEQ ID NO: 80302 - protein, 41 aa, Artificial Sequence
  GFR-binding peptide
  MOD_RES (5), (6), (39), (41): Xaa is C or S
  MOD_RES (20), (21), (22), (23), (24): Xaa is A or G
  MOD_RES (25), (26), (27), (28): Xaa is A or G or is absent
VPSTXXAPVKTSAISMLYLXXXXXXXXXLKNYQMIVEEXGX

SEQ ID NO: 80303 - protein, 43 aa, Artificial Sequence
  GFR-binding peptide
  MOD_RES (6), (7), (41), (43): Xaa is C or S
  MOD_RES (21), (22), (23), (24), (25): Xaa is A or G
  MOD_RES (26), (27), (28), (29): Xaa is A or G or is absent
AAPASXXVPARLSAISILYLXXXXXXXXXLKNYQDMVVEAXGX

SEQ ID NO: 80304 - protein, 35 aa, Artificial Sequence; identical to SEQ ID NO: 7088
  GFR-binding peptide
  MOD_RES (1), (35): Xaa is C or S
  MOD_RES (15), (16), (17), (18), (19): Xaa is A or G
  MOD_RES (20), (21), (22), (23): Xaa is A or G or is absent

SEQ ID NO: 80305 - protein, 41 aa, Artificial Sequence; identical to SEQ ID NO: 14403
  GFR-binding peptide
  MOD_RES (3), (4), (38), (40): Xaa is C or S
  MOD_RES (18), (19), (20), (21), (22): Xaa is A or G
  MOD_RES (23), (24), (25), (26): Xaa is A or G or is absent

SEQ ID NO: 80306 - protein, 39 aa, Artificial Sequence; identical to SEQ ID NO: 7090
  GFR-binding peptide
  MOD_RES (3), (4), (37), (39): Xaa is C or S
  MOD_RES (18), (19), (20), (21), (22): Xaa is A or G
  MOD_RES (23), (24), (25), (26): Xaa is A or G or is absent

SEQ ID NO: 80307 - protein, 34 aa, Artificial Sequence; identical to SEQ ID NO: 8851
  GFR-binding peptide
  MOD_RES (1), (2): Xaa is C or S
  MOD_RES (16), (17), (18), (19), (20): Xaa is A or G
  MOD_RES (21), (22), (23), (24): Xaa is A or G or is absent

SEQ ID NO: 80308 - protein, 37 aa, Artificial Sequence; identical to SEQ ID NO: 58189
  GFR-binding peptide
  MOD_RES (4), (5): Xaa is C or S
  MOD_RES (19), (20), (21), (22), (23): Xaa is A or G
  MOD_RES (24), (25), (26), (27): Xaa is A or G or is absent

SEQ ID NO: 80309 - protein, 36 aa, Artificial Sequence; identical to SEQ ID NO: 7091
  GFR-binding peptide
  MOD_RES (1), (33), (35): Xaa is C or S

SEQ ID NO: 80310 - protein, 33 aa, Artificial Sequence; identical to SEQ ID NO: 8854
  GFR-binding peptide
  MOD_RES (14), (15), (16), (17), (18): Xaa is A or G
  MOD_RES (19), (20), (21), (22): Xaa is A or G or is absent

SEQ ID NO: 80311 - protein, 39 aa, Artificial Sequence
  GFR-binding peptide
  MOD_RES (5), (6): Xaa is C or S
  MOD_RES (20), (21), (22), (23), (24): Xaa is A or G
  MOD_RES (25), (26), (27), (28): Xaa is A or G or is absent
IPEPXXVPEKMSAISILYLXXXXXXXXXLKNYQNMTVES

SEQ ID NO: 80312 - protein, 32 aa, Artificial Sequence; identical to SEQ ID NO: 58192
  GFR-binding peptide
  MOD_RES (14), (15), (16), (17), (18): Xaa is A or G
  MOD_RES (19), (20), (21), (22): Xaa is A or G or is absent

SEQ ID NO: 80313 - protein, 32 aa, Artificial Sequence; identical to SEQ ID NO: 7094
  GFR-binding peptide
  MOD_RES (14), (15), (16), (17), (18): Xaa is A or G
  MOD_RES (19), (20), (21), (22): Xaa is A or G or is absent

SEQ ID NO: 80314 - protein, 40 aa, Artificial Sequence
  GFR-binding peptide
  MOD_RES (3), (4), (38), (40): Xaa is C or S
  MOD_RES (18), (19), (20), (21), (22): Xaa is A or G
  MOD_RES (23), (24), (25), (26): Xaa is A or G or is absent
KAXXVPTKLSAISILYLXXXXXXXXXLKNYQGMAVSEXGX

SEQ ID NO: 80315 - protein, 35 aa, Artificial Sequence; identical to SEQ ID NO: 8857
  GFR-binding peptide
  MOD_RES (1), (35): Xaa is C or S
  MOD_RES (15), (16), (17), (18), (19): Xaa is A or G
  MOD_RES (20), (21), (22), (23): Xaa is A or G or is absent

SEQ ID NO: 80316 - protein, 41 aa, Artificial Sequence; identical to SEQ ID NO: 58194
  GFR-binding peptide
  MOD_RES (3), (4), (38), (40): Xaa is C or S
  MOD_RES (18), (19), (20), (21), (22): Xaa is A or G
  MOD_RES (23), (24), (25), (26): Xaa is A or G or is absent

SEQ ID NO: 80317 - protein, 36 aa, Artificial Sequence; identical to SEQ ID NO: 8858
  GFR-binding peptide
  MOD_RES (3), (4), (35): Xaa is C or S

SEQ ID NO: 80318 - protein, 37 aa, Artificial Sequence
  GFR-binding peptide
  MOD_RES (4), (5): Xaa is C or S
  MOD_RES (19), (20), (21), (22), (23): Xaa is A or G
  MOD_RES (24), (25), (26), (27): Xaa is A or G or is absent
PASXXVPARLSAISILYLXXXXXXXXXLKNYQDMVVE

SEQ ID NO: 80319 - protein, 35 aa, Artificial Sequence; identical to SEQ ID NO: 14419
  GFR-binding peptide
  MOD_RES (4), (5): Xaa is C or S

SEQ ID NO: 80320 - protein, 32 aa, Artificial Sequence; identical to SEQ ID NO: 8861
  GFR-binding peptide

SEQ ID NO: 80321 - protein, 42 aa, Artificial Sequence; identical to SEQ ID NO: 7099
  GFR-binding peptide
  MOD_RES (6), (7), (39), (41): Xaa is C or S

SEQ ID NO: 80322 - protein, 40 aa, Artificial Sequence; identical to SEQ ID NO: 8863
  GFR-binding peptide
  MOD_RES (3), (4), (38), (40): Xaa is C or S
  MOD_RES (18), (19), (20), (21), (22): Xaa is A or G
  MOD_RES (23), (24), (25), (26): Xaa is A or G or is absent

SEQ ID NO: 80323 - protein, 42 aa, Artificial Sequence; identical to SEQ ID NO: 7101
  GFR-binding peptide
  MOD_RES (5), (6), (40), (42): Xaa is C or S
  MOD_RES (20), (21), (22), (23), (24): Xaa is A or G
  MOD_RES (25), (26), (27), (28): Xaa is A or G or is absent

SEQ ID NO: 80324 - protein, 35 aa, Artificial Sequence; identical to SEQ ID NO: 8865
  GFR-binding peptide
  MOD_RES (1), (33), (35): Xaa is C or S

SEQ ID NO: 80325 - protein, 33 aa, Artificial Sequence; identical to SEQ ID NO: 8866
  GFR-binding peptide
  MOD_RES (1), (1): Xaa is C or S
  MOD_RES (15), (16), (17), (18), (19): Xaa is A or G
  MOD_RES (20), (21), (22), (23): Xaa is A or G or is absent

SEQ ID NO: 80326 - protein, 31 aa, Artificial Sequence; identical to SEQ ID NO: 58197
  GFR-binding peptide
  MOD_RES (1), (1): Xaa is C or S

SEQ ID NO: 80327 - protein, 42 aa, Artificial Sequence; identical to SEQ ID NO: 7102
  GFR-binding peptide
  MOD_RES (6), (7), (39), (41): Xaa is C or S

SEQ ID NO: 80328 - protein, 35 aa, Artificial Sequence; identical to SEQ ID NO: 8868
  GFR-binding peptide
  MOD_RES (3), (4), (35): Xaa is C or S

SEQ ID NO: 80329 - protein, 39 aa, Artificial Sequence; identical to SEQ ID NO: 8870
  GFR-binding peptide
  MOD_RES (2), (3), (37), (39): Xaa is C or S
  MOD_RES (17), (18), (19), (20), (21): Xaa is A or G
  MOD_RES (22), (23), (24), (25): Xaa is A or G or is absent

SEQ ID NO: 80330 - protein, 43 aa, Artificial Sequence
  GFR-binding peptide
  MOD_RES (5), (6), (40), (42): Xaa is C or S
  MOD_RES (20), (21), (22), (23), (24): Xaa is A or G
  MOD_RES (25), (26), (27), (28): Xaa is A or G or is absent
APASXXVPARLSAISILYLXXXXXXXXXLKNYQDMVVEAXGXR

SEQ ID NO: 80331 - protein, 34 aa, Artificial Sequence; identical to SEQ ID NO: 30234
  GFR-binding peptide
  MOD_RES (1), (33): Xaa is C or S

SEQ ID NO: 80332 - protein, 39 aa, Artificial Sequence
  GFR-binding peptide
  MOD_RES (6), (7), (38): Xaa is C or S
RVPSTXXAPVKTSAISMLYLDNGRVLLLKNYQMIVEEXG

SEQ ID NO: 80333 - protein, 36 aa, Artificial Sequence; identical to SEQ ID NO: 8874
  GFR-binding peptide
  MOD_RES (3), (4): Xaa is C or S

SEQ ID NO: 80334 - protein, 35 aa, Artificial Sequence; identical to SEQ ID NO: 7106
  GFR-binding peptide
  MOD_RES (2), (3): Xaa is C or S
  MOD_RES (17), (18), (19), (20), (21): Xaa is A or G
  MOD_RES (22), (23), (24), (25): Xaa is A or G or is absent

SEQ ID NO: 80335 - protein, 41 aa, Artificial Sequence; identical to SEQ ID NO: 7108
  GFR-binding peptide
  MOD_RES (6), (7), (40): Xaa is C or S

SEQ ID NO: 80336 - protein, 35 aa, Artificial Sequence; identical to SEQ ID NO: 8875
  GFR-binding peptide
  MOD_RES (1), (35): Xaa is C or S
  MOD_RES (15), (16), (17), (18), (19): Xaa is A or G
  MOD_RES (20), (21), (22), (23): Xaa is A or G or is absent

SEQ ID NO: 80337 - protein, 39 aa, Artificial Sequence; identical to SEQ ID NO: 8879
  GFR-binding peptide
  MOD_RES (6), (7): Xaa is C or S
  MOD_RES (21), (22), (23), (24), (25): Xaa is A or G
  MOD_RES (26), (27), (28), (29): Xaa is A or G or is absent

SEQ ID NO: 80338 - protein, 33 aa, Artificial Sequence; identical to SEQ ID NO: 7110
  GFR-binding peptide
  MOD_RES (1), (32): Xaa is C or S

SEQ ID NO: 80339 - protein, 35 aa, Artificial Sequence; identical to SEQ ID NO: 8881
  GFR-binding peptide
  MOD_RES (1), (2), (35): Xaa is C or S
  MOD_RES (16), (17), (18), (19), (20): Xaa is A or G
  MOD_RES (21), (22), (23), (24): Xaa is A or G or is absent

SEQ ID NO: 80340 - protein, 38 aa, Artificial Sequence
  GFR-binding peptide
  MOD_RES (1), (2), (36), (38): Xaa is C or S
  MOD_RES (16), (17), (18), (19), (20): Xaa is A or G
  MOD_RES (21), (22), (23), (24): Xaa is A or G or is absent
XXTPTKMSAISMLYLXXXXXXXXXLKNYQGMVVDRXGX

SEQ ID NO: 80341 - protein, 38 aa, Artificial Sequence; identical to SEQ ID NO: 57245
  GFR-binding peptide
  MOD_RES (6), (7): Xaa is C or S

SEQ ID NO: 80342 - protein, 36 aa, Artificial Sequence
  GFR-binding peptide
  MOD_RES (1), (33), (35): Xaa is C or S
XVPTKLSAISILYLDKGVVTYLKNYQGMAVSEXGXR

SEQ ID NO: 80343 - protein, 35 aa, Artificial Sequence; identical to SEQ ID NO: 7112
  GFR-binding peptide
  MOD_RES (1), (35): Xaa is C or S
  MOD_RES (15), (16), (17), (18), (19): Xaa is A or G
  MOD_RES (20), (21), (22), (23): Xaa is A or G or is absent

SEQ ID NO: 80344 - protein, 36 aa, Artificial Sequence; identical to SEQ ID NO: 7117
  GFR-binding peptide
  MOD_RES (1), (33), (35): Xaa is C or S

SEQ ID NO: 80345 - protein, 32 aa, Artificial Sequence; identical to SEQ ID NO: 8886
  GFR-binding peptide
  MOD_RES (1), (2): Xaa is C or S

SEQ ID NO: 80346 - protein, 41 aa, Artificial Sequence; identical to SEQ ID NO: 7121
  GFR-binding peptide
  MOD_RES (5), (6), (39), (41): Xaa is C or S
  MOD_RES (20), (21), (22), (23), (24): Xaa is A or G
  MOD_RES (25), (26), (27), (28): Xaa is A or G or is absent

SEQ ID NO: 80347 - protein, 41 aa, Artificial Sequence; identical to SEQ ID NO: 8888
  GFR-binding peptide
  MOD_RES (4), (5), (40): Xaa is C or S
  MOD_RES (19), (20), (21), (22), (23): Xaa is A or G
  MOD_RES (24), (25), (26), (27): Xaa is A or G or is absent

SEQ ID NO: 80348 - protein, 39 aa, Artificial Sequence; identical to SEQ ID NO: 57250
  GFR-binding peptide
  MOD_RES (3), (4), (37), (39): Xaa is C or S
  MOD_RES (18), (19), (20), (21), (22): Xaa is A or G
  MOD_RES (23), (24), (25), (26): Xaa is A or G or is absent

SEQ ID NO: 80349 - protein, 37 aa, Artificial Sequence; identical to SEQ ID NO: 8889
  GFR-binding peptide
  MOD_RES (1), (2), (35), (37): Xaa is C or S
  MOD_RES (16), (17), (18), (19), (20): Xaa is A or G
  MOD_RES (21), (22), (23), (24): Xaa is A or G or is absent

SEQ ID NO: 80350 - protein, 40 aa, Artificial Sequence; identical to SEQ ID NO: 8890
  GFR-binding peptide
  MOD_RES (5), (6), (38), (40): Xaa is C or S

SEQ ID NO: 80351 - protein, 37 aa, Artificial Sequence; identical to SEQ ID NO: 7126
  GFR-binding peptide
  MOD_RES (34), (36): Xaa is C or S
  MOD_RES (14), (15), (16), (17), (18): Xaa is A or G
  MOD_RES (19), (20), (21), (22): Xaa is A or G or is absent

SEQ ID NO: 80352 - protein, 35 aa, Artificial Sequence; identical to SEQ ID NO: 8891
  GFR-binding peptide
  MOD_RES (1), (2), (34): Xaa is C or S

SEQ ID NO: 80353 - protein, 36 aa, Artificial Sequence
  GFR-binding peptide
  MOD_RES (1), (35): Xaa is C or S
  MOD_RES (15), (16), (17), (18), (19): Xaa is A or G
  MOD_RES (20), (21), (22), (23): Xaa is A or G or is absent
XVPEKMSAISILYLXXXXXXXXXLKNYQNMTVESXA

SEQ ID NO: 80354 - protein, 40 aa, Artificial Sequence; identical to SEQ ID NO: 8892
  GFR-binding peptide
  MOD_RES (5), (6), (37), (39): Xaa is C or S

SEQ ID NO: 80355 - protein, 36 aa, Artificial Sequence; identical to SEQ ID NO: 30257
  GFR-binding peptide
  MOD_RES (5), (6): Xaa is C or S

SEQ ID NO: 80356 - protein, 39 aa, Artificial Sequence; identical to SEQ ID NO: 7127
  GFR-binding peptide
  MOD_RES (3), (4), (39): Xaa is C or S
  MOD_RES (18), (19), (20), (21), (22): Xaa is A or G
  MOD_RES (23), (24), (25), (26): Xaa is A or G or is absent

SEQ ID NO: 80357 - protein, 37 aa, Artificial Sequence; identical to SEQ ID NO: 8895
  GFR-binding peptide
  MOD_RES (6), (7): Xaa is C or S

SEQ ID NO: 80358 - protein, 42 aa, Artificial Sequence; identical to SEQ ID NO: 8896
  GFR-binding peptide
  MOD_RES (5), (6), (41): Xaa is C or S
  MOD_RES (20), (21), (22), (23), (24): Xaa is A or G
  MOD_RES (25), (26), (27), (28): Xaa is A or G or is absent

SEQ ID NO: 80359 - protein, 40 aa, Artificial Sequence; identical to SEQ ID NO: 28306
  GFR-binding peptide
  MOD_RES (6), (7): Xaa is C or S
  MOD_RES (21), (22), (23), (24), (25): Xaa is A or G
  MOD_RES (26), (27), (28), (29): Xaa is A or G or is absent

SEQ ID NO: 80360 - protein, 40 aa, Artificial Sequence; identical to SEQ ID NO: 67789
  GFR-binding peptide
  MOD_RES (4), (5), (39): Xaa is C or S
  MOD_RES (19), (20), (21), (22), (23): Xaa is A or G
  MOD_RES (24), (25), (26), (27): Xaa is A or G or is absent

SEQ ID NO: 80361 - protein, 41 aa, Artificial Sequence; identical to SEQ ID NO: 8898
  GFR-binding peptide
  MOD_RES (6), (7), (38), (40): Xaa is C or S

SEQ ID NO: 80362 - protein, 35 aa, Artificial Sequence; identical to SEQ ID NO: 30264
  GFR-binding peptide
  MOD_RES (1), (2), (34): Xaa is C or S

SEQ ID NO: 80363 - protein, 39 aa, Artificial Sequence; identical to SEQ ID NO: 57264
  GFR-binding peptide
  MOD_RES (4), (5), (38): Xaa is C or S
  MOD_RES (19), (20), (21), (22), (23): Xaa is A or G
  MOD_RES (24), (25), (26), (27): Xaa is A or G or is absent

SEQ ID NO: 80364 - protein, 37 aa, Artificial Sequence; identical to SEQ ID NO: 57265
  GFR-binding peptide
  MOD_RES (1), (2), (34), (36): Xaa is C or S

SEQ ID NO: 80365 - protein, 36 aa, Artificial Sequence; identical to SEQ ID NO: 7130
  GFR-binding peptide
  MOD_RES (2), (3), (35): Xaa is C or S

SEQ ID NO: 80366 - protein, 37 aa, Artificial Sequence; identical to SEQ ID NO: 7131
  GFR-binding peptide
  MOD_RES (7), (7): Xaa is C or S

SEQ ID NO: 80367 - protein, 35 aa, Artificial Sequence; identical to SEQ ID NO: 8901
  GFR-binding peptide
  MOD_RES (2), (3): Xaa is C or S
  MOD_RES (17), (18), (19), (20), (21): Xaa is A or G
  MOD_RES (22), (23), (24), (25): Xaa is A or G or is absent

SEQ ID NO: 80368 - protein, 34 aa, Artificial Sequence
  GFR-binding peptide
  MOD_RES (3), (4): Xaa is C or S
EPXXVPEKMSAISILYLDENKNVVLKNYQNMTVE

SEQ ID NO: 80369 - protein, 39 aa, Artificial Sequence; identical to SEQ ID NO: 8902
  GFR-binding peptide
  MOD_RES (1), (2), (36), (38): Xaa is C or S
  MOD_RES (16), (17), (18), (19), (20): Xaa is A or G
  MOD_RES (21), (22), (23), (24): Xaa is A or G or is absent

SEQ ID NO: 80370 - protein, 37 aa, Artificial Sequence; identical to SEQ ID NO: 57267
  GFR-binding peptide
  MOD_RES (3), (4), (36): Xaa is C or S

SEQ ID NO: 80371 - protein, 35 aa, Artificial Sequence; identical to SEQ ID NO: 8904
  GFR-binding peptide
  MOD_RES (2), (3): Xaa is C or S

SEQ ID NO: 80372 - protein, 30 aa, Artificial Sequence; identical to SEQ ID NO: 28317
  GFR-binding peptide

SEQ ID NO: 80373 - protein, 41 aa, Artificial Sequence; identical to SEQ ID NO: 7136
  GFR-binding peptide
  MOD_RES (6), (7): Xaa is C or S
  MOD_RES (21), (22), (23), (24), (25): Xaa is A or G
  MOD_RES (26), (27), (28), (29): Xaa is A or G or is absent

SEQ ID NO: 80374 - protein, 32 aa, Artificial Sequence; identical to SEQ ID NO: 14458
  GFR-binding peptide
  MOD_RES (1), (1): Xaa is C or S

SEQ ID NO: 80375 - protein, 37 aa, Artificial Sequence; identical to SEQ ID NO: 16207
  GFR-binding peptide
  MOD_RES (2), (3), (35), (37): Xaa is C or S

SEQ ID NO: 80376 - protein, 36 aa, Artificial Sequence; identical to SEQ ID NO: 8905
  GFR-binding peptide
  MOD_RES (4), (5), (36): Xaa is C or S

SEQ ID NO: 80377 - protein, 36 aa, Artificial Sequence; identical to SEQ ID NO: 71160
  GFR-binding peptide
  MOD_RES (1), (2), (34), (36): Xaa is C or S

SEQ ID NO: 80378 - protein, 34 aa, Artificial Sequence; identical to SEQ ID NO: 7145
  GFR-binding peptide
  MOD_RES (33), (33): Xaa is C or S

SEQ ID NO: 80379 - protein, 37 aa, Artificial Sequence; identical to SEQ ID NO: 69511
  GFR-binding peptide
  MOD_RES (34), (36): Xaa is C or S
  MOD_RES (14), (15), (16), (17), (18): Xaa is A or G
  MOD_RES (19), (20), (21), (22): Xaa is A or G or is absent

SEQ ID NO: 80380 - protein, 40 aa, Artificial Sequence; identical to SEQ ID NO: 57277
  GFR-binding peptide
  MOD_RES (4), (5), (37), (39): Xaa is C or S

SEQ ID NO: 80381 - protein, 33 aa, Artificial Sequence; identical to SEQ ID NO: 67811
  GFR-binding peptide
  MOD_RES (1), (2): Xaa is C or S

SEQ ID NO: 80382 - protein, 31 aa, Artificial Sequence; identical to SEQ ID NO: 8908
  GFR-binding peptide
  MOD_RES (1), (1): Xaa is C or S

SEQ ID NO: 80383 - protein, 36 aa, Artificial Sequence
  GFR-binding peptide
  MOD_RES (4), (5): Xaa is C or S
PEPXXVPEKMSAISILYLDENKNVVLKNYQNMTVES

SEQ ID NO: 80384 - protein, 40 aa, Artificial Sequence; identical to SEQ ID NO: 7150
  GFR-binding peptide
  MOD_RES (3), (4), (38), (40): Xaa is C or S
  MOD_RES (18), (19), (20), (21), (22): Xaa is A or G
  MOD_RES (23), (24), (25), (26): Xaa is A or G or is absent

SEQ ID NO: 80385 - protein, 37 aa, Artificial Sequence; identical to SEQ ID NO: 7151
  GFR-binding peptide
  MOD_RES (1), (35), (37): Xaa is C or S
  MOD_RES (15), (16), (17), (18), (19): Xaa is A or G
  MOD_RES (20), (21), (22), (23): Xaa is A or G or is absent

SEQ ID NO: 80386 - protein, 42 aa, Artificial Sequence; identical to SEQ ID NO: 8910
  GFR-binding peptide
  MOD_RES (5), (6), (39), (41): Xaa is C or S
  MOD_RES (20), (21), (22), (23), (24): Xaa is A or G
  MOD_RES (25), (26), (27), (28): Xaa is A or G or is absent

SEQ ID NO: 80387 - protein, 40 aa, Artificial Sequence
  GFR-binding peptide
  MOD_RES (5), (6), (37), (39): Xaa is C or S
VPSTXXAPVKTSAISMLYLDNGRVLLLKNYQMIVEEXGXL

SEQ ID NO: 80388 - protein, 43 aa, Artificial Sequence; identical to SEQ ID NO: 30282
  GFR-binding peptide
  MOD_RES (6), (7), (41), (43): Xaa is C or S
  MOD_RES (21), (22), (23), (24), (25): Xaa is A or G
  MOD_RES (26), (27), (28), (29): Xaa is A or G or is absent

SEQ ID NO: 80389 - protein, 36 aa, Artificial Sequence; identical to SEQ ID NO: 7152
  GFR-binding peptide
  MOD_RES (1), (33), (35): Xaa is C or S

SEQ ID NO: 80390 - protein, 41 aa, Artificial Sequence; identical to SEQ ID NO: 8912
  GFR-binding peptide
  MOD_RES (6), (7), (40): Xaa is C or S
  MOD_RES (21), (22), (23), (24), (25): Xaa is A or G
  MOD_RES (26), (27), (28), (29): Xaa is A or G or is absent

SEQ ID NO: 80391 - protein, 41 aa, Artificial Sequence; identical to SEQ ID NO: 8913
  GFR-binding peptide
  MOD_RES (6), (7), (40): Xaa is C or S
  MOD_RES (21), (22), (23), (24), (25): Xaa is A or G
  MOD_RES (26), (27), (28), (29): Xaa is A or G or is absent

SEQ ID NO: 80392 - protein, 39 aa, Artificial Sequence; identical to SEQ ID NO: 8915
  GFR-binding peptide
  MOD_RES (2), (3), (37), (39): Xaa is C or S
  MOD_RES (17), (18), (19), (20), (21): Xaa is A or G
  MOD_RES (22), (23), (24), (25): Xaa is A or G or is absent

SEQ ID NO: 80393 - protein, 35 aa, Artificial Sequence; identical to SEQ ID NO: 8916
  GFR-binding peptide
  MOD_RES (32), (34): Xaa is C or S

SEQ ID NO: 80394 - protein, 30 aa, Artificial Sequence; identical to SEQ ID NO: 71172
  GFR-binding peptide

SEQ ID NO: 80395 - protein, 39 aa, Artificial Sequence; identical to SEQ ID NO: 7155
  GFR-binding peptide
  MOD_RES (6), (7): Xaa is C or S

SEQ ID NO: 80396 - protein, 41 aa, Artificial Sequence
  GFR-binding peptide
  MOD_RES (5), (6), (38), (40): Xaa is C or S
APASXXVPARLSAISILYLDAANNVVLKNYQDMVVEAXGXR

SEQ ID NO: 80397 - protein, 39 aa, Artificial Sequence; identical to SEQ ID NO: 7159
  GFR-binding peptide
  MOD_RES (6), (7), (39): Xaa is C or S

SEQ ID NO: 80398 - protein, 34 aa, Artificial Sequence; identical to SEQ ID NO: 30289
  GFR-binding peptide
  MOD_RES (2), (3): Xaa is C or S

SEQ ID NO: 80399 - protein, 42 aa, Artificial Sequence; identical to SEQ ID NO: 69522
  GFR-binding peptide
  MOD_RES (5), (6), (40), (42): Xaa is C or S
  MOD_RES (20), (21), (22), (23), (24): Xaa is A or G
  MOD_RES (25), (26), (27), (28): Xaa is A or G or is absent

SEQ ID NO: 80400 - protein, 36 aa, Artificial Sequence; identical to SEQ ID NO: 16218
  GFR-binding peptide
  MOD_RES (34), (36): Xaa is C or S
  MOD_RES (14), (15), (16), (17), (18): Xaa is A or G
  MOD_RES (19), (20), (21), (22): Xaa is A or G or is absent

SEQ ID NO: 80401 - protein, 37 aa, Artificial Sequence; identical to SEQ ID NO: 14474
  GFR-binding peptide
  MOD_RES (3), (4), (36): Xaa is C or S

SEQ ID NO: 80402 - protein, 37 aa, Artificial Sequence; identical to SEQ ID NO: 69525
  GFR-binding peptide
  MOD_RES (4), (5), (37): Xaa is C or S

SEQ ID NO: 80403 - protein, 33 aa, Artificial Sequence; identical to SEQ ID NO: 16220
  GFR-binding peptide
  MOD_RES (32), (32): Xaa is C or S

SEQ ID NO: 80404 - protein, 38 aa, Artificial Sequence; identical to SEQ ID NO: 7161
  GFR-binding peptide
  MOD_RES (2), (3), (36), (38): Xaa is C or S
  MOD_RES (17), (18), (19), (20), (21): Xaa is A or G
  MOD_RES (22), (23), (24), (25): Xaa is A or G or is absent

SEQ ID NO: 80405 - protein, 39 aa, Artificial Sequence
  GFR-binding peptide
  MOD_RES (5), (6), (38): Xaa is C or S
APASXXVPARLSAISILYLDAANNVVLKNYQDMVVEAXG

SEQ ID NO: 80406 - protein, 39 aa, Artificial Sequence; identical to SEQ ID NO: 8919
  GFR-binding peptide
  MOD_RES (2), (3), (36), (38): Xaa is C or S

SEQ ID NO: 80407 - protein, 35 aa, Artificial Sequence; identical to SEQ ID NO: 57296
  GFR-binding peptide
  MOD_RES (1), (2), (35): Xaa is C or S
  MOD_RES (16), (17), (18), (19), (20): Xaa is A or G
  MOD_RES (21), (22), (23), (24): Xaa is A or G or is absent

SEQ ID NO: 80408 - protein, 38 aa, Artificial Sequence; identical to SEQ ID NO: 8920
  GFR-binding peptide
  MOD_RES (3), (4), (36), (38): Xaa is C or S

SEQ ID NO: 80409 - protein, 45 aa, Artificial Sequence; identical to SEQ ID NO: 8922
  GFR-binding peptide
  MOD_RES (6), (7), (42), (44): Xaa is C or S
  MOD_RES (21), (22), (23), (24), (25): Xaa is A or G
  MOD_RES (26), (27), (28), (29): Xaa is A or G or is absent

SEQ ID NO: 80410 - protein, 37 aa, Artificial Sequence; identical to SEQ ID NO: 8923
  GFR-binding peptide
  MOD_RES (3), (4), (37): Xaa is C or S

SEQ ID NO: 80411 - protein, 33 aa, Artificial Sequence; identical to SEQ ID NO: 8925
  GFR-binding peptide
  MOD_RES (1), (1): Xaa is C or S
  MOD_RES (15), (16), (17), (18), (19): Xaa is A or G
  MOD_RES (20), (21), (22), (23): Xaa is A or G or is absent

SEQ ID NO: 80412 - protein, 40 aa, Artificial Sequence; identical to SEQ ID NO: 8926
  GFR-binding peptide
  MOD_RES (5), (6), (38), (40): Xaa is C or S

SEQ ID NO: 80413 - protein, 37 aa, Artificial Sequence; identical to SEQ ID NO: 7168
  GFR-binding peptide
  MOD_RES (5), (6), (37): Xaa is C or S

SEQ ID NO: 80414 - protein, 39 aa, Artificial Sequence; identical to SEQ ID NO: 8927
  GFR-binding peptide
  MOD_RES (6), (7), (38): Xaa is C or S

SEQ ID NO: 80415 - protein, 37 aa, Artificial Sequence; identical to SEQ ID NO: 7170
  GFR-binding peptide
  MOD_RES (2), (3), (36): Xaa is C or S
  MOD_RES (17), (18), (19), (20), (21): Xaa is A or G
  MOD_RES (22), (23), (24), (25): Xaa is A or G or is absent

SEQ ID NO: 80416 - protein, 40 aa, Artificial Sequence; identical to SEQ ID NO: 8928
  GFR-binding peptide
  MOD_RES (4), (5), (39): Xaa is C or S
  MOD_RES (19), (20), (21), (22), (23): Xaa is A or G
  MOD_RES (24), (25), (26), (27): Xaa is A or G or is absent

SEQ ID NO: 80417 - protein, 35 aa, Artificial Sequence
  GFR-binding peptide
  MOD_RES (1), (2): Xaa is C or S
  MOD_RES (16), (17), (18), (19), (20): Xaa is A or G
  MOD_RES (21), (22), (23), (24): Xaa is A or G or is absent
XXVPTKLSAISILYLXXXXXXXXXLKNYQGMAVSE

SEQ ID NO: 80418 - protein, 37 aa, Artificial Sequence; identical to SEQ ID NO: 7171
  GFR-binding peptide
  MOD_RES (5), (6), (37): Xaa is C or S

SEQ ID NO: 80419 - protein, 41 aa, Artificial Sequence; identical to SEQ ID NO: 7173
  GFR-binding peptide
  MOD_RES (6), (7), (41): Xaa is C or S
  MOD_RES (21), (22), (23), (24), (25): Xaa is A or G
  MOD_RES (26), (27), (28), (29): Xaa is A or G or is absent

SEQ ID NO: 80420 - protein, 42 aa, Artificial Sequence; identical to SEQ ID NO: 16229
  GFR-binding peptide
  MOD_RES (6), (7), (41): Xaa is C or S
  MOD_RES (21), (22), (23), (24), (25): Xaa is A or G
  MOD_RES (26), (27), (28), (29): Xaa is A or G or is absent

SEQ ID NO: 80421 - protein, 33 aa, Artificial Sequence
  GFR-binding peptide
  MOD_RES (2), (3): Xaa is C or S
PXXTPTKMSAISMLYLNDKQQIILKNYQGMVVD

SEQ ID NO: 80422 - protein, 39 aa, Artificial Sequence; identical to SEQ ID NO: 8935
  GFR-binding peptide
  MOD_RES (3), (4), (37), (39): Xaa is C or S
  MOD_RES (18), (19), (20), (21), (22): Xaa is A or G
  MOD_RES (23), (24), (25), (26): Xaa is A or G or is absent

SEQ ID NO: 80423 - protein, 43 aa, Artificial Sequence
  GFR-binding peptide
  MOD_RES (6), (7), (41), (43): Xaa is C or S
  MOD_RES (21), (22), (23), (24), (25): Xaa is A or G
  MOD_RES (26), (27), (28), (29): Xaa is A or G or is absent
GIPEPXXVPEKMSAISILYLXXXXXXXXXLKNYQNMTVESXAX

SEQ ID NO: 80424 - protein, 35 aa, Artificial Sequence; identical to SEQ ID NO: 28346
  GFR-binding peptide
  MOD_RES (1), (2): Xaa is C or S
  MOD_RES (16), (17), (18), (19), (20): Xaa is A or G
  MOD_RES (21), (22), (23), (24): Xaa is A or G or is absent

SEQ ID NO: 80425 - protein, 35 aa, Artificial Sequence
  GFR-binding peptide
  MOD_RES (32), (34): Xaa is C or S
VPARLSAISILYLDAANNVVLKNYQDMVVEAXGXR

SEQ ID NO: 80426 - protein, 37 aa, Artificial Sequence
  GFR-binding peptide
  MOD_RES (5), (6): Xaa is C or S
IPEPXXVPEKMSAISILYLDENKNVVLKNYQNMTVES

SEQ ID NO: 80427 - protein, 35 aa, Artificial Sequence; identical to SEQ ID NO: 8937
  GFR-binding peptide
  MOD_RES (1), (32), (34): Xaa is C or S

SEQ ID NO: 80428 - protein, 36 aa, Artificial Sequence; identical to SEQ ID NO: 7176
  GFR-binding peptide
  MOD_RES (33), (35): Xaa is C or S
  MOD_RES (14), (15), (16), (17), (18): Xaa is A or G
  MOD_RES (19), (20), (21), (22): Xaa is A or G or is absent

SEQ ID NO: 80429 - protein, 37 aa, Artificial Sequence; identical to SEQ ID NO: 7179
  GFR-binding peptide
  MOD_RES (2), (3), (36): Xaa is C or S
  MOD_RES (17), (18), (19), (20), (21): Xaa is A or G
  MOD_RES (22), (23), (24), (25): Xaa is A or G or is absent

SEQ ID NO: 80430 - protein, 40 aa, Artificial Sequence; identical to SEQ ID NO: 8938
  GFR-binding peptide
  MOD_RES (6), (7): Xaa is C or S
  MOD_RES (21), (22), (23), (24), (25): Xaa is A or G
  MOD_RES (26), (27), (28), (29): Xaa is A or G or is absent

SEQ ID NO: 80431 - protein, 37 aa, Artificial Sequence; identical to SEQ ID NO: 8939
  GFR-binding peptide
  MOD_RES (2), (3): Xaa is C or S
  MOD_RES (17), (18), (19), (20), (21): Xaa is A or G
  MOD_RES (22), (23), (24), (25): Xaa is A or G or is absent

SEQ ID NO: 80432 - protein, 37 aa, Artificial Sequence
  GFR-binding peptide
  MOD_RES (6), (7): Xaa is C or S
HVPKPXXAPTKLSAISVLYLDDSSNVILKNYQNMVVR

SEQ ID NO: 80433 - protein, 35 aa, Artificial Sequence; identical to SEQ ID NO: 7183
  GFR-binding peptide
  MOD_RES (32), (34): Xaa is C or S

SEQ ID NO: 80434 - protein, 43 aa, Artificial Sequence; identical to SEQ ID NO: 7185
  GFR-binding peptide
  MOD_RES (6), (7), (41), (43): Xaa is C or S
  MOD_RES (21), (22), (23), (24), (25): Xaa is A or G
  MOD_RES (26), (27), (28), (29): Xaa is A or G or is absent

SEQ ID NO: 80435 - protein, 40 aa, Artificial Sequence
  GFR-binding peptide
  MOD_RES (2), (3), (37), (39): Xaa is C or S
  MOD_RES (17), (18), (19), (20), (21): Xaa is A or G
  MOD_RES (22), (23), (24), (25): Xaa is A or G or is absent
PXXVPEKMSAISILYLXXXXXXXXXLKNYQNMTVESXAXR

SEQ ID NO: 80436 - protein, 35 aa, Artificial Sequence; identical to SEQ ID NO: 28352
  GFR-binding peptide
  MOD_RES (4), (5): Xaa is C or S

SEQ ID NO: 80437 - protein, 36 aa, Artificial Sequence; identical to SEQ ID NO: 7187
  GFR-binding peptide
  MOD_RES (1), (2), (36): Xaa is C or S
  MOD_RES (16), (17), (18), (19), (20): Xaa is A or G
  MOD_RES (21), (22), (23), (24): Xaa is A or G or is absent

SEQ ID NO: 80438 - protein, 37 aa, Artificial Sequence; identical to SEQ ID NO: 57314
  GFR-binding peptide
  MOD_RES (3), (4): Xaa is C or S
  MOD_RES (18), (19), (20), (21), (22): Xaa is A or G
  MOD_RES (23), (24), (25), (26): Xaa is A or G or is absent

SEQ ID NO: 80439 - protein, 41 aa, Artificial Sequence; identical to SEQ ID NO: 67843
  GFR-binding peptide
  MOD_RES (6), (7), (39), (41): Xaa is C or S

SEQ ID NO: 80440 - protein, 39 aa, Artificial Sequence; identical to SEQ ID NO: 28356
  GFR-binding peptide
  MOD_RES (6), (7), (39): Xaa is C or S

SEQ ID NO: 80441 - protein, 42 aa, Artificial Sequence
  GFR-binding peptide
  MOD_RES (6), (7), (41): Xaa is C or S
  MOD_RES (21), (22), (23), (24), (25): Xaa is A or G
  MOD_RES (26), (27), (28), (29): Xaa is A or G or is absent
KASKAXXVPTKLSAISILYLXXXXXXXXXLKNYQGMAVSEXG

SEQ ID NO: 80442 - protein, 33 aa, Artificial Sequence; identical to SEQ ID NO: 7193
  GFR-binding peptide
  MOD_RES (2), (3): Xaa is C or S

SEQ ID NO: 80443 - protein, 39 aa, Artificial Sequence; identical to SEQ ID NO: 66145
  GFR-binding peptide
  MOD_RES (5), (6): Xaa is C or S
  MOD_RES (20), (21), (22), (23), (24): Xaa is A or G
  MOD_RES (25), (26), (27), (28): Xaa is A or G or is absent

SEQ ID NO: 80444 - protein, 36 aa, Artificial Sequence; identical to SEQ ID NO: 8950
  GFR-binding peptide
  MOD_RES (2), (3): Xaa is C or S
  MOD_RES (17), (18), (19), (20), (21): Xaa is A or G
  MOD_RES (22), (23), (24), (25): Xaa is A or G or is absent

SEQ ID NO: 80445 - protein, 38 aa, Artificial Sequence; identical to SEQ ID NO: 66147
  GFR-binding peptide
  MOD_RES (1), (35), (37): Xaa is C or S
  MOD_RES (15), (16), (17), (18), (19): Xaa is A or G
  MOD_RES (20), (21), (22), (23): Xaa is A or G or is absent

SEQ ID NO: 80446 - protein, 35 aa, Artificial Sequence; identical to SEQ ID NO: 8951
  GFR-binding peptide
  MOD_RES (2), (3), (35): Xaa is C or S

SEQ ID NO: 80447 - protein, 37 aa, Artificial Sequence; identical to SEQ ID NO: 7195
  GFR-binding peptide
  MOD_RES (1), (2), (34), (36): Xaa is C or S

SEQ ID NO: 80448 - protein, 36 aa, Artificial Sequence; identical to SEQ ID NO: 7197
  GFR-binding peptide
  MOD_RES (1), (2), (36): Xaa is C or S
  MOD_RES (16), (17), (18), (19), (20): Xaa is A or G
  MOD_RES (21), (22), (23), (24): Xaa is A or G or is absent

SEQ ID NO: 80449 - protein, 41 aa, Artificial Sequence; identical to SEQ ID NO: 28366
  GFR-binding peptide
  MOD_RES (6), (7), (39), (41): Xaa is C or S

SEQ ID NO: 80450 - protein, 37 aa, Artificial Sequence; identical to SEQ ID NO: 7199
  GFR-binding peptide
  MOD_RES (1), (35), (37): Xaa is C or S
  MOD_RES (15), (16), (17), (18), (19): Xaa is A or G
  MOD_RES (20), (21), (22), (23): Xaa is A or G or is absent

SEQ ID NO: 80451 - protein, 42 aa, Artificial Sequence; identical to SEQ ID NO: 8955
  GFR-binding peptide
  MOD_RES (6), (7), (39), (41): Xaa is C or S

SEQ ID NO: 80452 - protein, 42 aa, Artificial Sequence
  GFR-binding peptide
  MOD_RES (5), (6), (40), (42): Xaa is C or S
  MOD_RES (20), (21), (22), (23), (24): Xaa is A or G
  MOD_RES (25), (26), (27), (28): Xaa is A or G or is absent
ASKAXXVPTKLSAISILYLXXXXXXXXXLKNYQGMAVSEXGX

SEQ ID NO: 80453 - protein, 37 aa, Artificial Sequence; identical to SEQ ID NO: 7200
  GFR-binding peptide
  MOD_RES (3), (4), (35), (37): Xaa is C or S

SEQ ID NO: 80454 - protein, 35 aa, Artificial Sequence; identical to SEQ ID NO: 8957
  GFR-binding peptide
  MOD_RES (1), (33), (35): Xaa is C or S

SEQ ID NO: 80455 - protein, 40 aa, Artificial Sequence; identical to SEQ ID NO: 8959
  GFR-binding peptide
  MOD_RES (3), (4), (37), (39): Xaa is C or S
  MOD_RES (18), (19), (20), (21), (22): Xaa is A or G
  MOD_RES (23), (24), (25), (26): Xaa is A or G or is absent

SEQ ID NO: 80456 - protein, 39 aa, Artificial Sequence; identical to SEQ ID NO: 8960
  GFR-binding peptide
  MOD_RES (6), (7), (38): Xaa is C or S

SEQ ID NO: 80457 - protein, 41 aa, Artificial Sequence
  GFR-binding peptide
  MOD_RES (6), (7), (41): Xaa is C or S
  MOD_RES (21), (22), (23), (24), (25): Xaa is A or G
  MOD_RES (26), (27), (28), (29): Xaa is A or G or is absent
AAPASXXVPARLSAISILYLXXXXXXXXXLKNYQDMVVEAX

SEQ ID NO: 80458 - protein, 36 aa, Artificial Sequence; identical to SEQ ID NO: 7203
  GFR-binding peptide
  MOD_RES (3), (4), (35): Xaa is C or S

SEQ ID NO: 80459 - protein, 42 aa, Artificial Sequence
  GFR-binding peptide
  MOD_RES (4), (5), (39), (41): Xaa is C or S
  MOD_RES (19), (20), (21), (22), (23): Xaa is A or G
  MOD_RES (24), (25), (26), (27): Xaa is A or G or is absent
SKAXXVPTKLSAISILYLXXXXXXXXXLKNYQGMAVSEXGXR

SEQ ID NO: 80460 - protein, 42 aa, Artificial Sequence; identical to SEQ ID NO: 7204
  GFR-binding peptide
  MOD_RES (5), (6), (40), (42): Xaa is C or S
  MOD_RES (20), (21), (22), (23), (24): Xaa is A or G
  MOD_RES (25), (26), (27), (28): Xaa is A or G or is absent

SEQ ID NO: 80461 - protein, 34 aa, Artificial Sequence; identical to SEQ ID NO: 8964
  GFR-binding peptide
  MOD_RES (32), (34): Xaa is C or S

SEQ ID NO: 80462 - protein, 34 aa, Artificial Sequence
  GFR-binding peptide
  MOD_RES (1), (2): Xaa is C or S
  MOD_RES (16), (17), (18), (19), (20): Xaa is A or G
  MOD_RES (21), (22), (23), (24): Xaa is A or G or is absent
XXAPVKTSAISMLYLXXXXXXXXXLKNYQMIVEE

SEQ ID NO: 80463 - protein, 36 aa, Artificial Sequence; identical to SEQ ID NO: 30338
  GFR-binding peptide
  MOD_RES (3), (4), (36): Xaa is C or S

SEQ ID NO: 80464 - protein, 35 aa, Artificial Sequence; identical to SEQ ID NO: 8968
  GFR-binding peptide
  MOD_RES (32), (34): Xaa is C or S

SEQ ID NO: 80465 - protein, 36 aa, Artificial Sequence; identical to SEQ ID NO: 7207
  GFR-binding peptide
  MOD_RES (2), (3), (34), (36): Xaa is C or S

SEQ ID NO: 80466 - protein, 36 aa, Artificial Sequence; identical to SEQ ID NO: 8971
  GFR-binding peptide
  MOD_RES (5), (6): Xaa is C or S

SEQ ID NO: 80467 - protein, 41 aa, Artificial Sequence; identical to SEQ ID NO: 8972
  GFR-binding peptide
  MOD_RES (4), (5), (38), (40): Xaa is C or S
  MOD_RES (19), (20), (21), (22), (23): Xaa is A or G
  MOD_RES (24), (25), (26), (27): Xaa is A or G or is absent

SEQ ID NO: 80468 - protein, 38 aa, Artificial Sequence; identical to SEQ ID NO: 7209
  GFR-binding peptide
  MOD_RES (1), (35), (37): Xaa is C or S
  MOD_RES (15), (16), (17), (18), (19): Xaa is A or G
  MOD_RES (20), (21), (22), (23): Xaa is A or G or is absent

SEQ ID NO: 80469 - protein, 39 aa, Artificial Sequence
  GFR-binding peptide
  MOD_RES (6), (7): Xaa is C or S
  MOD_RES (21), (22), (23), (24), (25): Xaa is A or G
  MOD_RES (26), (27), (28), (29): Xaa is A or G or is absent
AAPASXXVPARLSAISILYLXXXXXXXXXLKNYQDMVVE

SEQ ID NO: 80470 - protein, 39 aa, Artificial Sequence
  GFR-binding peptide
  MOD_RES (4), (5), (38): Xaa is C or S
  MOD_RES (19), (20), (21), (22), (23): Xaa is A or G
  MOD_RES (24), (25), (26), (27): Xaa is A or G or is absent
PSTXXAPVKTSAISMLYLXXXXXXXXXLKNYQMIVEEXG

SEQ ID NO: 80471 - protein, 39 aa, Artificial Sequence; identical to SEQ ID NO: 7210
  GFR-binding peptide
  MOD_RES (5), (6): Xaa is C or S
  MOD_RES (20), (21), (22), (23), (24): Xaa is A or G
  MOD_RES (25), (26), (27), (28): Xaa is A or G or is absent

SEQ ID NO: 80472 - protein, 40 aa, Artificial Sequence; identical to SEQ ID NO: 14516
  GFR-binding peptide
  MOD_RES (5), (6), (38), (40): Xaa is C or S

SEQ ID NO: 80473 - protein, 36 aa, Artificial Sequence; identical to SEQ ID NO: 7214
  GFR-binding peptide
  MOD_RES (1), (33), (35): Xaa is C or S

SEQ ID NO: 80474 - protein, 37 aa, Artificial Sequence; identical to SEQ ID NO: 57342
  GFR-binding peptide
  MOD_RES (1), (35), (37): Xaa is C or S
  MOD_RES (15), (16), (17), (18), (19): Xaa is A or G
  MOD_RES (20), (21), (22), (23): Xaa is A or G or is absent

SEQ ID NO: 80475 - protein, 33 aa, Artificial Sequence; identical to SEQ ID NO: 57343
  GFR-binding peptide
  MOD_RES (14), (15), (16), (17), (18): Xaa is A or G
  MOD_RES (19), (20), (21), (22): Xaa is A or G or is absent

SEQ ID NO: 80476 - protein, 40 aa, Artificial Sequence
  GFR-binding peptide
  MOD_RES (4), (5), (37), (39): Xaa is C or S
PASXXVPARLSAISILYLDAANNVVLKNYQDMVVEAXGXR

SEQ ID NO: 80477 - protein, 39 aa, Artificial Sequence; identical to SEQ ID NO: 14518
  GFR-binding peptide
  MOD_RES (1), (2), (36), (38): Xaa is C or S
  MOD_RES (16), (17), (18), (19), (20): Xaa is A or G
  MOD_RES (21), (22), (23), (24): Xaa is A or G or is absent

SEQ ID NO: 80478 - protein, 40 aa, Artificial Sequence
  GFR-binding peptide
  MOD_RES (6), (7), (39): Xaa is C or S
KASKAXXVPTKLSAISILYLDKGVVTYLKNYQGMAVSEXG

SEQ ID NO: 80479 - protein, 40 aa, Artificial Sequence; identical to SEQ ID NO: 69557
  GFR-binding peptide
  MOD_RES (5), (6), (38), (40): Xaa is C or S

SEQ ID NO: 80480 - protein, 44 aa, Artificial Sequence; identical to SEQ ID NO: 8976
  GFR-binding peptide
  MOD_RES (5), (6), (41), (43): Xaa is C or S
  MOD_RES (20), (21), (22), (23), (24): Xaa is A or G
  MOD_RES (25), (26), (27), (28): Xaa is A or G or is absent

SEQ ID NO: 80481 - protein, 39 aa, Artificial Sequence; identical to SEQ ID NO: 8977
  GFR-binding peptide
  MOD_RES (3), (4), (36), (38): Xaa is C or S

SEQ ID NO: 80482 - protein, 32 aa, Artificial Sequence; identical to SEQ ID NO: 7215
  GFR-binding peptide
  MOD_RES (14), (15), (16), (17), (18): Xaa is A or G
  MOD_RES (19), (20), (21), (22): Xaa is A or G or is absent

SEQ ID NO: 80483 - protein, 42 aa, Artificial Sequence; identical to SEQ ID NO: 8979
  GFR-binding peptide
  MOD_RES (6), (7), (41): Xaa is C or S
  MOD_RES (21), (22), (23), (24), (25): Xaa is A or G
  MOD_RES (26), (27), (28), (29): Xaa is A or G or is absent

SEQ ID NO: 80484 - protein, 38 aa, Artificial Sequence; identical to SEQ ID NO: 8980
  GFR-binding peptide
  MOD_RES (5), (6), (38): Xaa is C or S

SEQ ID NO: 80485 - protein, 32 aa, Artificial Sequence; identical to SEQ ID NO: 8981
  GFR-binding peptide
  MOD_RES (31), (31): Xaa is C or S

SEQ ID NO: 80486 - protein, 39 aa, Artificial Sequence; identical to SEQ ID NO: 57351
  GFR-binding peptide
  MOD_RES (2), (3), (37), (39): Xaa is C or S
  MOD_RES (17), (18), (19), (20), (21): Xaa is A or G
  MOD_RES (22), (23), (24), (25): Xaa is A or G or is absent

SEQ ID NO: 80487 - protein, 36 aa, Artificial Sequence; identical to SEQ ID NO: 7218
  GFR-binding peptide
  MOD_RES (3), (4): Xaa is C or S

SEQ ID NO: 80488 - protein, 36 aa, Artificial Sequence; identical to SEQ ID NO: 16277
  GFR-binding peptide
  MOD_RES (3), (4): Xaa is C or S
  MOD_RES (18), (19), (20), (21), (22): Xaa is A or G
  MOD_RES (23), (24), (25), (26): Xaa is A or G or is absent

SEQ ID NO: 80489 - protein, 36 aa, Artificial Sequence
  GFR-binding peptide
  MOD_RES (1), (33), (35): Xaa is C or S
XVPARLSAISILYLDAANNVVLKNYQDMVVEAXGXR

SEQ ID NO: 80490 - protein, 37 aa, Artificial Sequence
  GFR-binding peptide
  MOD_RES (1), (2), (35), (37): Xaa is C or S
  MOD_RES (16), (17), (18), (19), (20): Xaa is A or G
  MOD_RES (21), (22), (23), (24): Xaa is A or G or is absent
XXAPVKTSAISMLYLXXXXXXXXXLKNYQMIVEEXGX

SEQ ID NO: 80491 - protein, 34 aa, Artificial Sequence; identical to SEQ ID NO: 7223
  GFR-binding peptide
  MOD_RES (1), (2), (34): Xaa is C or S

SEQ ID NO: 80492 - protein, 30 aa, Artificial Sequence; identical to SEQ ID NO: 16279
  GFR-binding peptide

SEQ ID NO: 80493 - protein, 36 aa, Artificial Sequence; identical to SEQ ID NO: 7225
  GFR-binding peptide
  MOD_RES (1), (36): Xaa is C or S
  MOD_RES (15), (16), (17), (18), (19): Xaa is A or G
  MOD_RES (20), (21), (22), (23): Xaa is A or G or is absent

SEQ ID NO: 80494 - protein, 35 aa, Artificial Sequence; identical to SEQ ID NO: 30366
  GFR-binding peptide
  MOD_RES (34), (34): Xaa is C or S
  MOD_RES (14), (15), (16), (17), (18): Xaa is A or G
  MOD_RES (19), (20), (21), (22): Xaa is A or G or is absent

SEQ ID NO: 80495 - protein, 41 aa, Artificial Sequence
  GFR-binding peptide
  MOD_RES (3), (4), (38), (40): Xaa is C or S
  MOD_RES (18), (19), (20), (21), (22): Xaa is A or G
  MOD_RES (23), (24), (25), (26): Xaa is A or G or is absent
EPXXVPEKMSAISILYLXXXXXXXXXLKNYQNMTVESXAXR

SEQ ID NO: 80496 - protein, 35 aa, Artificial Sequence; identical to SEQ ID NO: 8987
  GFR-binding peptide
  MOD_RES (3), (3): Xaa is C or S
  MOD_RES (17), (18), (19), (20), (21): Xaa is A or G
  MOD_RES (22), (23), (24), (25): Xaa is A or G or is absent

SEQ ID NO: 80497 - protein, 39 aa, Artificial Sequence; identical to SEQ ID NO: 8990
  GFR-binding peptide
  MOD_RES (1), (36), (38): Xaa is C or S
  MOD_RES (15), (16), (17), (18), (19): Xaa is A or G
  MOD_RES (20), (21), (22), (23): Xaa is A or G or is absent

SEQ ID NO: 80498 - protein, 41 aa, Artificial Sequence; identical to SEQ ID NO: 8991
  GFR-binding peptide
  MOD_RES (5), (6), (40): Xaa is C or S
  MOD_RES (20), (21), (22), (23), (24): Xaa is A or G
  MOD_RES (25), (26), (27), (28): Xaa is A or G or is absent

SEQ ID NO: 80499 - protein, 35 aa, Artificial Sequence; identical to SEQ ID NO: 8995
  GFR-binding peptide
  MOD_RES (1), (34): Xaa is C or S
  MOD_RES (15), (16), (17), (18), (19): Xaa is A or G
  MOD_RES (20), (21), (22), (23): Xaa is A or G or is absent

SEQ ID NO: 80500 - protein, 33 aa, Artificial Sequence; identical to SEQ ID NO: 8997
  GFR-binding peptide
  MOD_RES (1), (33): Xaa is C or S

SEQ ID NO: 80501 - protein, 34 aa, Artificial Sequence; identical to SEQ ID NO: 28397
  GFR-binding peptide
  MOD_RES (34), (34): Xaa is C or S
  MOD_RES (14), (15), (16), (17), (18): Xaa is A or G
  MOD_RES (19), (20), (21), (22): Xaa is A or G or is absent

SEQ ID NO: 80502 - protein, 34 aa, Artificial Sequence; identical to SEQ ID NO: 57364
  GFR-binding peptide
  MOD_RES (3), (4): Xaa is C or S

SEQ ID NO: 80503 - protein, 34 aa, Artificial Sequence
  GFR-binding peptide
  MOD_RES (3), (4): Xaa is C or S
ASXXVPARLSAISILYLDAANNVVLKNYQDMVVE

SEQ ID NO: 80504 - protein, 37 aa, Artificial Sequence
  GFR-binding peptide
  MOD_RES (34), (36): Xaa is C or S
  MOD_RES (14), (15), (16), (17), (18): Xaa is A or G
  MOD_RES (19), (20), (21), (22): Xaa is A or G or is absent
TPTKMSAISMLYLXXXXXXXXXLKNYQGMVVDRXGXS

SEQ ID NO: 80505 - protein, 40 aa, Artificial Sequence; identical to SEQ ID NO: 7234
  GFR-binding peptide
  MOD_RES (6), (7), (40): Xaa is C or S
  MOD_RES (21), (22), (23), (24), (25): Xaa is A or G
  MOD_RES (26), (27), (28), (29): Xaa is A or G or is absent

SEQ ID NO: 80506 - protein, 36 aa, Artificial Sequence; identical to SEQ ID NO: 9001
  GFR-binding peptide
  MOD_RES (2), (3): Xaa is C or S
  MOD_RES (17), (18), (19), (20), (21): Xaa is A or G
  MOD_RES (22), (23), (24), (25): Xaa is A or G or is absent

SEQ ID NO: 80507 - protein, 36 aa, Artificial Sequence; identical to SEQ ID NO: 7237
  GFR-binding peptide
  MOD_RES (3), (4), (35): Xaa is C or S

SEQ ID NO: 80508 - protein, 36 aa, Artificial Sequence; identical to SEQ ID NO: 7239
  GFR-binding peptide
  MOD_RES (3), (4): Xaa is C or S
  MOD_RES (18), (19), (20), (21), (22): Xaa is A or G
  MOD_RES (23), (24), (25), (26): Xaa is A or G or is absent

SEQ ID NO: 80509 - protein, 31 aa, Artificial Sequence; identical to SEQ ID NO: 9003
  GFR-binding peptide
  MOD_RES (1), (1): Xaa is C or S

SEQ ID NO: 80510 - protein, 38 aa, Artificial Sequence; identical to SEQ ID NO: 9005
  GFR-binding peptide
  MOD_RES (3), (4), (36), (38): Xaa is C or S

SEQ ID NO: 80511 - protein, 42 aa, Artificial Sequence; identical to SEQ ID NO: 9006
  GFR-binding peptide
  MOD_RES (5), (6), (40), (42): Xaa is C or S
  MOD_RES (20), (21), (22), (23), (24): Xaa is A or G
  MOD_RES (25), (26), (27), (28): Xaa is A or G or is absent

SEQ ID NO: 80512 - protein, 39 aa, Artificial Sequence; identical to SEQ ID NO: 9009
  GFR-binding peptide
  MOD_RES (1), (2), (36), (38): Xaa is C or S
  MOD_RES (16), (17), (18), (19), (20): Xaa is A or G
  MOD_RES (21), (22), (23), (24): Xaa is A or G or is absent

SEQ ID NO: 80513 - protein, 42 aa, Artificial Sequence; identical to SEQ ID NO: 16301
  GFR-binding peptide
  MOD_RES (4), (5), (39), (41): Xaa is C or S
  MOD_RES (19), (20), (21), (22), (23): Xaa is A or G
  MOD_RES (24), (25), (26), (27): Xaa is A or G or is absent

SEQ ID NO: 80514 - protein, 31 aa, Artificial Sequence; identical to SEQ ID NO: 16304
  GFR-binding peptide

SEQ ID NO: 80515 - protein, 40 aa, Artificial Sequence
  GFR-binding peptide
  MOD_RES (2), (3), (37), (39): Xaa is C or S
  MOD_RES (17), (18), (19), (20), (21): Xaa is A or G
  MOD_RES (22), (23), (24), (25): Xaa is A or G or is absent
SXXVPARLSAISILYLXXXXXXXXXLKNYQDMVVEAXGXR

SEQ ID NO: 80516 - protein, 33 aa, Artificial Sequence; identical to SEQ ID NO: 9011
  GFR-binding peptide
  MOD_RES (1), (2): Xaa is C or S

SEQ ID NO: 80517 - protein, 32 aa, Artificial Sequence; identical to SEQ ID NO: 9012
  GFR-binding peptide
  MOD_RES (1), (2): Xaa is C or S

SEQ ID NO: 80518 - protein, 44 aa, Artificial Sequence; identical to SEQ ID NO: 9014
  GFR-binding peptide
  MOD_RES (6), (7), (41), (43): Xaa is C or S
  MOD_RES (21), (22), (23), (24), (25): Xaa is A or G
  MOD_RES (26), (27), (28), (29): Xaa is A or G or is absent

SEQ ID NO: 80519 - protein, 37 aa, Artificial Sequence; identical to SEQ ID NO: 57389
  GFR-binding peptide
  MOD_RES (2), (3), (37): Xaa is C or S
  MOD_RES (17), (18), (19), (20), (21): Xaa is A or G
  MOD_RES (22), (23), (24), (25): Xaa is A or G or is absent

SEQ ID NO: 80520 - protein, 36 aa, Artificial Sequence; identical to SEQ ID NO: 57390
  GFR-binding peptide
  MOD_RES (33), (35): Xaa is C or S
  MOD_RES (14), (15), (16), (17), (18): Xaa is A or G
  MOD_RES (19), (20), (21), (22): Xaa is A or G or is absent

SEQ ID NO: 80521 - protein, 34 aa, Artificial Sequence; identical to SEQ ID NO: 9015
  GFR-binding peptide
  MOD_RES (1), (32), (34): Xaa is C or S

SEQ ID NO: 80522 - protein, 43 aa, Artificial Sequence; identical to SEQ ID NO: 7248
  GFR-binding peptide
  MOD_RES (5), (6), (40), (42): Xaa is C or S
  MOD_RES (20), (21), (22), (23), (24): Xaa is A or G
  MOD_RES (25), (26), (27), (28): Xaa is A or G or is absent

SEQ ID NO: 80523 - protein, 39 aa, Artificial Sequence; identical to SEQ ID NO: 9017
  GFR-binding peptide
  MOD_RES (7), (7): Xaa is C or S
  MOD_RES (21), (22), (23), (24), (25): Xaa is A or G
  MOD_RES (26), (27), (28), (29): Xaa is A or G or is absent

SEQ ID NO: 80524 - protein, 45 aa, Artificial Sequence; identical to SEQ ID NO: 9018
  GFR-binding peptide
  MOD_RES (6), (7), (42), (44): Xaa is C or S
  MOD_RES (21), (22), (23), (24), (25): Xaa is A or G
  MOD_RES (26), (27), (28), (29): Xaa is A or G or is absent

SEQ ID NO: 80525 - protein, 37 aa, Artificial Sequence; identical to SEQ ID NO: 9019
  GFR-binding peptide
  MOD_RES (6), (7): Xaa is C or S

SEQ ID NO: 80526 - protein, 40 aa, Artificial Sequence; identical to SEQ ID NO: 9020
  GFR-binding peptide
  MOD_RES (5), (6), (40): Xaa is C or S
  MOD_RES (20), (21), (22), (23), (24): Xaa is A or G
  MOD_RES (25), (26), (27), (28): Xaa is A or G or is absent

SEQ ID NO: 80527 - protein, 35 aa, Artificial Sequence; identical to SEQ ID NO: 7252
  GFR-binding peptide
  MOD_RES (2), (3), (35): Xaa is C or S

SEQ ID NO: 80528 - protein, 39 aa, Artificial Sequence; identical to SEQ ID NO: 16319
  GFR-binding peptide
  MOD_RES (5), (6): Xaa is C or S
  MOD_RES (20), (21), (22), (23), (24): Xaa is A or G
  MOD_RES (25), (26), (27), (28): Xaa is A or G or is absent

SEQ ID NO: 80529 - protein, 35 aa, Artificial Sequence
  GFR-binding peptide
  MOD_RES (32), (34): Xaa is C or S
VPEKMSAISILYLDENKNVVLKNYQNMTVESXAXR

SEQ ID NO: 80530 - protein, 38 aa, Artificial Sequence
  GFR-binding peptide
  MOD_RES (2), (3), (35), (37): Xaa is C or S
PXXTPTKMSAISMLYLNDKQQIILKNYQGMVVDRXGXS

SEQ ID NO: 80531 - protein, 36 aa, Artificial Sequence; identical to SEQ ID NO: 57397
  GFR-binding peptide
  MOD_RES (5), (6): Xaa is C or S

SEQ ID NO: 80532 - protein, 38 aa, Artificial Sequence
  GFR-binding peptide
  MOD_RES (2), (3), (36), (38): Xaa is C or S
  MOD_RES (17), (18), (19), (20), (21): Xaa is A or G
  MOD_RES (22), (23), (24), (25): Xaa is A or G or is absent
TXXAPVKTSAISMLYLXXXXXXXXXLKNYQMIVEEXGX

SEQ ID NO: 80533 - protein, 40 aa, Artificial Sequence; identical to SEQ ID NO: 28438
  GFR-binding peptide
  MOD_RES (5), (6), (38), (40): Xaa is C or S

SEQ ID NO: 80534 - protein, 38 aa, Artificial Sequence; identical to SEQ ID NO: 7254
  GFR-binding peptide
  MOD_RES (3), (4), (38): Xaa is C or S
  MOD_RES (18), (19), (20), (21), (22): Xaa is A or G
  MOD_RES (23), (24), (25), (26): Xaa is A or G or is absent

SEQ ID NO: 80535 - protein, 32 aa, Artificial Sequence
  GFR-binding peptide
  MOD_RES (1), (1): Xaa is C or S
XTPTKMSAISMLYLNDKQQIILKNYQGMVVDR

SEQ ID NO: 80536 - protein, 37 aa, Artificial Sequence; identical to SEQ ID NO: 7255
  GFR-binding peptide
  MOD_RES (4), (5): Xaa is C or S
  MOD_RES (19), (20), (21), (22), (23): Xaa is A or G
  MOD_RES (24), (25), (26), (27): Xaa is A or G or is absent

SEQ ID NO: 80537 - protein, 40 aa, Artificial Sequence; identical to SEQ ID NO: 7256
  GFR-binding peptide
  MOD_RES (5), (6), (37), (39): Xaa is C or S

SEQ ID NO: 80538 - protein, 44 aa, Artificial Sequence; identical to SEQ ID NO: 14555
  GFR-binding peptide
  MOD_RES (6), (7), (41), (43): Xaa is C or S
  MOD_RES (21), (22), (23), (24), (25): Xaa is A or G
  MOD_RES (26), (27), (28), (29): Xaa is A or G or is absent

SEQ ID NO: 80539 - protein, 40 aa, Artificial Sequence; identical to SEQ ID NO: 7257
  GFR-binding peptide
  MOD_RES (4), (5), (39): Xaa is C or S
  MOD_RES (19), (20), (21), (22), (23): Xaa is A or G
  MOD_RES (24), (25), (26), (27): Xaa is A or G or is absent

SEQ ID NO: 80540 - protein, 35 aa, Artificial Sequence; identical to SEQ ID NO: 7258
  GFR-binding peptide
  MOD_RES (1), (2): Xaa is C or S
  MOD_RES (16), (17), (18), (19), (20): Xaa is A or G
  MOD_RES (21), (22), (23), (24): Xaa is A or G or is absent

SEQ ID NO: 80541 - protein, 36 aa, Artificial Sequence
  GFR-binding peptide
  MOD_RES (2), (3), (36): Xaa is C or S
  MOD_RES (17), (18), (19), (20), (21): Xaa is A or G
  MOD_RES (22), (23), (24), (25): Xaa is A or G or is absent
TXXAPVKTSAISMLYLXXXXXXXXXLKNYQMIVEEX

SEQ ID NO: 80542 - protein, 30 aa, Artificial Sequence; identical to SEQ ID NO: 7259
  GFR-binding peptide

SEQ ID NO: 80543 - protein, 41 aa, Artificial Sequence; identical to SEQ ID NO: 9027
  GFR-binding peptide
  MOD_RES (6), (7), (41): Xaa is C or S
  MOD_RES (21), (22), (23), (24), (25): Xaa is A or G
  MOD_RES (26), (27), (28), (29): Xaa is A or G or is absent

SEQ ID NO: 80544 - protein, 39 aa, Artificial Sequence; identical to SEQ ID NO: 16329
  GFR-binding peptide
  MOD_RES (5), (6): Xaa is C or S
  MOD_RES (20), (21), (22), (23), (24): Xaa is A or G
  MOD_RES (25), (26), (27), (28): Xaa is A or G or is absent

SEQ ID NO: 80545 - protein, 33 aa, Artificial Sequence; identical to SEQ ID NO: 9030
  GFR-binding peptide
  MOD_RES (2), (3): Xaa is C or S

SEQ ID NO: 80546 - protein, 37 aa, Artificial Sequence; identical to SEQ ID NO: 30415
  GFR-binding peptide
  MOD_RES (1), (2), (36): Xaa is C or S
  MOD_RES (16), (17), (18), (19), (20): Xaa is A or G
  MOD_RES (21), (22), (23), (24): Xaa is A or G or is absent

SEQ ID NO: 80547 - protein, 37 aa, Artificial Sequence
  GFR-binding peptide
  MOD_RES (6), (7): Xaa is C or S
GIPEPXXVPEKMSAISILYLDENKNVVLKNYQNMTVE

SEQ ID NO: 80548 - protein, 35 aa, Artificial Sequence; identical to SEQ ID NO: 9031
  GFR-binding peptide
  MOD_RES (2), (3): Xaa is C or S

SEQ ID NO: 80549 - protein, 33 aa, Artificial Sequence; identical to SEQ ID NO: 9032
  GFR-binding peptide
  MOD_RES (1), (33): Xaa is C or S

SEQ ID NO: 80550 - protein, 40 aa, Artificial Sequence; identical to SEQ ID NO: 9033
  GFR-binding peptide
  MOD_RES (6), (7): Xaa is C or S
  MOD_RES (21), (22), (23), (24), (25): Xaa is A or G
  MOD_RES (26), (27), (28), (29): Xaa is A or G or is absent

SEQ ID NO: 80551 - protein, 42 aa, Artificial Sequence; identical to SEQ ID NO: 7262
  GFR-binding peptide
  MOD_RES (4), (5), (40), (42): Xaa is C or S
  MOD_RES (19), (20), (21), (22), (23): Xaa is A or G
  MOD_RES (24), (25), (26), (27): Xaa is A or G or is absent

SEQ ID NO: 80552 - protein, 36 aa, Artificial Sequence
  GFR-binding peptide
  MOD_RES (3), (4): Xaa is C or S
  MOD_RES (18), (19), (20), (21), (22): Xaa is A or G
  MOD_RES (23), (24), (25), (26): Xaa is A or G or is absent
EPXXVPEKMSAISILYLXXXXXXXXXLKNYQNMTVE

SEQ ID NO: 80553 - protein, 40 aa, Artificial Sequence; identical to SEQ ID NO: 7264
  GFR-binding peptide
  MOD_RES (3), (4), (37), (39): Xaa is C or S

SEQ ID NO: 80554 - protein, 36 aa, Artificial Sequence; identical to SEQ ID NO: 9036
  GFR-binding peptide
  MOD_RES (2), (34), (36): Xaa is C or S

SEQ ID NO: 80555 - protein, 42 aa, Artificial Sequence
  GFR-binding peptide
  MOD_RES (6), (7), (39), (41): Xaa is C or S
GIPEPXXVPEKMSAISILYLDENKNVVLKNYQNMTVESXAXR

SEQ ID NO: 80556 - protein, 37 aa, Artificial Sequence; identical to SEQ ID NO: 7266
  GFR-binding peptide
  MOD_RES (3), (4): Xaa is C or S
  MOD_RES (18), (19), (20), (21), (22): Xaa is A or G
  MOD_RES (23), (24), (25), (26): Xaa is A or G or is absent

SEQ ID NO: 80557 - protein, 36 aa, Artificial Sequence; identical to SEQ ID NO: 9038
  GFR-binding peptide
  MOD_RES (1), (34), (36): Xaa is C or S
  MOD_RES (15), (16), (17), (18), (19): Xaa is A or G
  MOD_RES (20), (21), (22), (23): Xaa is A or G or is absent

SEQ ID NO: 80558 - protein, 36 aa, Artificial Sequence; identical to SEQ ID NO: 9040
  GFR-binding peptide
  MOD_RES (33), (35): Xaa is C or S
  MOD_RES (14), (15), (16), (17), (18): Xaa is A or G
  MOD_RES (19), (20), (21), (22): Xaa is A or G or is absent

SEQ ID NO: 80559 - protein, 37 aa, Artificial Sequence
  GFR-binding peptide
  MOD_RES (6), (7): Xaa is C or S
AAPASXXVPARLSAISILYLDAANNVVLKNYQDMVVE

SEQ ID NO: 80560 - protein, 35 aa, Artificial Sequence; identical to SEQ ID NO: 16339
  GFR-binding peptide
  MOD_RES (1), (2): Xaa is C or S
  MOD_RES (16), (17), (18), (19), (20): Xaa is A or G
  MOD_RES (21), (22), (23), (24): Xaa is A or G or is absent

SEQ ID NO: 80561 - protein, 35 aa, Artificial Sequence; identical to SEQ ID NO: 30427
  GFR-binding peptide
  MOD_RES (4), (5): Xaa is C or S

SEQ ID NO: 80562 - protein, 36 aa, Artificial Sequence; identical to SEQ ID NO: 7272
  GFR-binding peptide
  MOD_RES (3), (4): Xaa is C or S
  MOD_RES (18), (19), (20), (21), (22): Xaa is A or G
  MOD_RES (23), (24), (25), (26): Xaa is A or G or is absent

SEQ ID NO: 80563 - protein, 32 aa, Artificial Sequence; identical to SEQ ID NO: 28449
  GFR-binding peptide
  MOD_RES (32), (32): Xaa is C or S

SEQ ID NO: 80564 - protein, 37 aa, Artificial Sequence
  GFR-binding peptide
  MOD_RES (34), (36): Xaa is C or S
  MOD_RES (14), (15), (16), (17), (18): Xaa is A or G
  MOD_RES (19), (20), (21), (22): Xaa is A or G or is absent
VPTKLSAISILYLXXXXXXXXXLKNYQGMAVSEXGXR

SEQ ID NO: 80565 - protein, 38 aa, Artificial Sequence; identical to SEQ ID NO: 7274
  GFR-binding peptide
  MOD_RES (6), (7), (38): Xaa is C or S

SEQ ID NO: 80566 - protein, 39 aa, Artificial Sequence; identical to SEQ ID NO: 9041
  GFR-binding peptide
  MOD_RES (3), (4), (37), (39): Xaa is C or S
  MOD_RES (18), (19), (20), (21), (22): Xaa is A or G
  MOD_RES (23), (24), (25), (26): Xaa is A or G or is absent

SEQ ID NO: 80567 - protein, 40 aa, Artificial Sequence; identical to SEQ ID NO: 28451
  GFR-binding peptide
  MOD_RES (4), (5), (39): Xaa is C or S
  MOD_RES (19), (20), (21), (22), (23): Xaa is A or G
  MOD_RES (24), (25), (26), (27): Xaa is A or G or is absent

SEQ ID NO: 80568 - protein, 37 aa, Artificial Sequence
  GFR-binding peptide
  MOD_RES (1), (35), (37): Xaa is C or S
  MOD_RES (15), (16), (17), (18), (19): Xaa is A or G
  MOD_RES (20), (21), (22), (23): Xaa is A or G or is absent
XVPTKLSAISILYLXXXXXXXXXLKNYQGMAVSEXGX

SEQ ID NO: 80569 - protein, 39 aa, Artificial Sequence; identical to SEQ ID NO: 9042
  GFR-binding peptide
  MOD_RES (3), (37), (39): Xaa is C or S
  MOD_RES (17), (18), (19), (20), (21): Xaa is A or G
  MOD_RES (22), (23), (24), (25): Xaa is A or G or is absent

SEQ ID NO: 80570 - protein, 37 aa, Artificial Sequence
  GFR-binding peptide
  MOD_RES (3), (4): Xaa is C or S
  MOD_RES (18), (19), (20), (21), (22): Xaa is A or G
  MOD_RES (23), (24), (25), (26): Xaa is A or G or is absent
GPXXTPTKMSAISMLYLXXXXXXXXXLKNYQGMVVDR

SEQ ID NO: 80571 - protein, 41 aa, Artificial Sequence; identical to SEQ ID NO: 9043
  GFR-binding peptide
  MOD_RES (6), (38), (40): Xaa is C or S

SEQ ID NO: 80572 - protein, 39 aa, Artificial Sequence; identical to SEQ ID NO: 9044
  GFR-binding peptide
  MOD_RES (5), (6), (38): Xaa is C or S

SEQ ID NO: 80573 - protein, 33 aa, Artificial Sequence
  GFR-binding peptide
  MOD_RES (1), (33): Xaa is C or S
XVPARLSAISILYLDAANNVVLKNYQDMVVEAX

SEQ ID NO: 80574 - protein, 34 aa, Artificial Sequence; identical to SEQ ID NO: 7279
  GFR-binding peptide
  MOD_RES (3), (4): Xaa is C or S

SEQ ID NO: 80575 - protein, 37 aa, Artificial Sequence; identical to SEQ ID NO: 9047
  GFR-binding peptide
  MOD_RES (34), (36): Xaa is C or S
  MOD_RES (14), (15), (16), (17), (18): Xaa is A or G
  MOD_RES (19), (20), (21), (22): Xaa is A or G or is absent

SEQ ID NO: 80576 - protein, 39 aa, Artificial Sequence; identical to SEQ ID NO: 7281
  GFR-binding peptide
  MOD_RES (5), (6), (38): Xaa is C or S

SEQ ID NO: 80577 - protein, 40 aa, Artificial Sequence; identical to SEQ ID NO: 9050
  GFR-binding peptide
  MOD_RES (5), (6), (37), (39): Xaa is C or S

SEQ ID NO: 80578 - protein, 36 aa, Artificial Sequence; identical to SEQ ID NO: 7282
  GFR-binding peptide
  MOD_RES (2), (3), (36): Xaa is C or S

SEQ ID NO: 80579 - protein, 43 aa, Artificial Sequence; identical to SEQ ID NO: 9053
  GFR-binding peptide
  MOD_RES (5), (6), (40), (42): Xaa is C or S
  MOD_RES (20), (21), (22), (23), (24): Xaa is A or G
  MOD_RES (25), (26), (27), (28): Xaa is A or G or is absent

SEQ ID NO: 80580 - protein, 40 aa, Artificial Sequence; identical to SEQ ID NO: 9054
  GFR-binding peptide
  MOD_RES (6), (7): Xaa is C or S
  MOD_RES (21), (22), (23), (24), (25): Xaa is A or G
  MOD_RES (26), (27), (28), (29): Xaa is A or G or is absent

SEQ ID NO: 80581 - protein, 37 aa, Artificial Sequence; identical to SEQ ID NO: 7283
  GFR-binding peptide
  MOD_RES (1), (35), (37): Xaa is C or S
  MOD_RES (15), (16), (17), (18), (19): Xaa is A or G
  MOD_RES (20), (21), (22), (23): Xaa is A or G or is absent

SEQ ID NO: 80582 - protein, 35 aa, Artificial Sequence; identical to SEQ ID NO: 9055
  GFR-binding peptide
  MOD_RES (4), (5): Xaa is C or S

SEQ ID NO: 80583 - protein, 42 aa, Artificial Sequence; identical to SEQ ID NO: 9056
  GFR-binding peptide
  MOD_RES (6), (7), (41): Xaa is C or S
  MOD_RES (21), (22), (23), (24), (25): Xaa is A or G
  MOD_RES (26), (27), (28), (29): Xaa is A or G or is absent

SEQ ID NO: 80584 - protein, 32 aa, Artificial Sequence
  GFR-binding peptide
  MOD_RES (1), (2): Xaa is C or S
XXVPARLSAISILYLDAANNVVLKNYQDMVVE

SEQ ID NO: 80585 - protein, 42 aa, Artificial Sequence; identical to SEQ ID NO: 16356
  GFR-binding peptide
  MOD_RES (6), (7), (39), (41): Xaa is C or S

SEQ ID NO: 80586 - protein, 42 aa, Artificial Sequence; identical to SEQ ID NO: 14584
  GFR-binding peptide
  MOD_RES (5), (6), (40), (42): Xaa is C or S
  MOD_RES (20), (21), (22), (23), (24): Xaa is A or G
  MOD_RES (25), (26), (27), (28): Xaa is A or G or is absent

SEQ ID NO: 80587 - protein, 34 aa, Artificial Sequence; identical to SEQ ID NO: 28462
  GFR-binding peptide
  MOD_RES (2), (3): Xaa is C or S

SEQ ID NO: 80588 - protein, 35 aa, Artificial Sequence; identical to SEQ ID NO: 57439
  GFR-binding peptide
  MOD_RES (32), (34): Xaa is C or S

SEQ ID NO: 80589 - protein, 33 aa, Artificial Sequence; identical to SEQ ID NO: 30438
  GFR-binding peptide
  MOD_RES (32), (32): Xaa is C or S

SEQ ID NO: 80590 - protein, 37 aa, Artificial Sequence; identical to SEQ ID NO: 7287
  GFR-binding peptide
  MOD_RES (3), (4): Xaa is C or S
  MOD_RES (18), (19), (20), (21), (22): Xaa is A or G
  MOD_RES (23), (24), (25), (26): Xaa is A or G or is absent

SEQ ID NO: 80591 - protein, 33 aa, Artificial Sequence; identical to SEQ ID NO: 28466
  GFR-binding peptide
  MOD_RES (14), (15), (16), (17), (18): Xaa is A or G
  MOD_RES (19), (20), (21), (22): Xaa is A or G or is absent

SEQ ID NO: 80592 - protein, 42 aa, Artificial Sequence; identical to SEQ ID NO: 7288
  GFR-binding peptide
  MOD_RES (5), (6), (40), (42): Xaa is C or S
  MOD_RES (20), (21), (22), (23), (24): Xaa is A or G
  MOD_RES (25), (26), (27), (28): Xaa is A or G or is absent

SEQ ID NO: 80593 - protein, 35 aa, Artificial Sequence; identical to SEQ ID NO: 57446
  GFR-binding peptide
  MOD_RES (3), (4): Xaa is C or S

SEQ ID NO: 80594 - protein, 34 aa, Artificial Sequence; identical to SEQ ID NO: 7289
  GFR-binding peptide
  MOD_RES (31), (33): Xaa is C or S

SEQ ID NO: 80595 - protein, 41 aa, Artificial Sequence
  GFR-binding peptide
  MOD_RES (4), (5), (38), (40): Xaa is C or S
  MOD_RES (19), (20), (21), (22), (23): Xaa is A or G
  MOD_RES (24), (25), (26), (27): Xaa is A or G or is absent
PSTXXAPVKTSAISMLYLXXXXXXXXXLKNYQMIVEEXGXL

SEQ ID NO: 80596 - protein, 42 aa, Artificial Sequence; identical to SEQ ID NO: 14591
  GFR-binding peptide
  MOD_RES (6), (7), (41): Xaa is C or S
  MOD_RES (21), (22), (23), (24), (25): Xaa is A or G
  MOD_RES (26), (27), (28), (29): Xaa is A or G or is absent

SEQ ID NO: 80597 - protein, 35 aa, Artificial Sequence; identical to SEQ ID NO: 7293
  GFR-binding peptide
  MOD_RES (4), (5): Xaa is C or S

SEQ ID NO: 80598 - protein, 35 aa, Artificial Sequence; identical to SEQ ID NO: 7294
  GFR-binding peptide
  MOD_RES (33), (35): Xaa is C or S

SEQ ID NO: 80599 - protein, 39 aa, Artificial Sequence; identical to SEQ ID NO: 16361
  GFR-binding peptide
  MOD_RES (5), (6), (38): Xaa is C or S

SEQ ID NO: 80600 - protein, 41 aa, Artificial Sequence; identical to SEQ ID NO: 57455
  GFR-binding peptide
  MOD_RES (6), (7), (40): Xaa is C or S
  MOD_RES (21), (22), (23), (24), (25): Xaa is A or G
  MOD_RES (26), (27), (28), (29): Xaa is A or G or is absent

SEQ ID NO: 80601 - protein, 35 aa, Artificial Sequence
  GFR-binding peptide
  MOD_RES (33), (35): Xaa is C or S
  MOD_RES (14), (15), (16), (17), (18): Xaa is A or G
  MOD_RES (19), (20), (21), (22): Xaa is A or G or is absent
APVKTSAISMLYLXXXXXXXXXLKNYQMIVEEXGX

SEQ ID NO: 80602 - protein, 35 aa, Artificial Sequence; identical to SEQ ID NO: 7297
  GFR-binding peptide
  MOD_RES (1), (2): Xaa is C or S
  MOD_RES (16), (17), (18), (19), (20): Xaa is A or G
  MOD_RES (21), (22), (23), (24): Xaa is A or G or is absent

SEQ ID NO: 80603 - protein, 30 aa, Artificial Sequence; identical to SEQ ID NO: 57457
  GFR-binding peptide

SEQ ID NO: 80604 - protein, 39 aa, Artificial Sequence; identical to SEQ ID NO: 9070
  GFR-binding peptide
  MOD_RES (3), (4), (37), (39): Xaa is C or S
  MOD_RES (18), (19), (20), (21), (22): Xaa is A or G
  MOD_RES (23), (24), (25), (26): Xaa is A or G or is absent

SEQ ID NO: 80605 - protein, 38 aa, Artificial Sequence; identical to SEQ ID NO: 9071
  GFR-binding peptide
  MOD_RES (3), (4), (37): Xaa is C or S
  MOD_RES (18), (19), (20), (21), (22): Xaa is A or G
  MOD_RES (23), (24), (25), (26): Xaa is A or G or is absent

SEQ ID NO: 80606 - protein, 32 aa, Artificial Sequence; identical to SEQ ID NO: 14597
  GFR-binding peptide
  MOD_RES (32), (32): Xaa is C or S

SEQ ID NO: 80607 - protein, 35 aa, Artificial Sequence; identical to SEQ ID NO: 9072
  GFR-binding peptide
  MOD_RES (1), (35): Xaa is C or S
  MOD_RES (15), (16), (17), (18), (19): Xaa is A or G
  MOD_RES (20), (21), (22), (23): Xaa is A or G or is absent

SEQ ID NO: 80608 - protein, 39 aa, Artificial Sequence
  GFR-binding peptide
  MOD_RES (2), (3), (37), (39): Xaa is C or S
  MOD_RES (17), (18), (19), (20), (21): Xaa is A or G
  MOD_RES (22), (23), (24), (25): Xaa is A or G or is absent
AXXVPTKLSAISILYLXXXXXXXXXLKNYQGMAVSEXGX

SEQ ID NO: 80609 - protein, 41 aa, Artificial Sequence; identical to SEQ ID NO: 7302
  GFR-binding peptide
  MOD_RES (5), (6), (39), (41): Xaa is C or S
  MOD_RES (20), (21), (22), (23), (24): Xaa is A or G
  MOD_RES (25), (26), (27), (28): Xaa is A or G or is absent

SEQ ID NO: 80610 - protein, 37 aa, Artificial Sequence; identical to SEQ ID NO: 7303
  GFR-binding peptide
  MOD_RES (4), (5): Xaa is C or S
  MOD_RES (19), (20), (21), (22), (23): Xaa is A or G
  MOD_RES (24), (25), (26), (27): Xaa is A or G or is absent

SEQ ID NO: 80611 - protein, 40 aa, Artificial Sequence; identical to SEQ ID NO: 57462
  GFR-binding peptide
  MOD_RES (5), (6), (39): Xaa is C or S
  MOD_RES (20), (21), (22), (23), (24): Xaa is A or G
  MOD_RES (25), (26), (27), (28): Xaa is A or G or is absent

SEQ ID NO: 80612 - protein, 37 aa, Artificial Sequence
  GFR-binding peptide
  MOD_RES (4), (5): Xaa is C or S
  MOD_RES (19), (20), (21), (22), (23): Xaa is A or G
  MOD_RES (24), (25), (26), (27): Xaa is A or G or is absent
PSTXXAPVKTSAISMLYLXXXXXXXXXLKNYQMIVEE

SEQ ID NO: 80613 - protein, 42 aa, Artificial Sequence; identical to SEQ ID NO: 30456
  GFR-binding peptide
  MOD_RES (6), (7), (41): Xaa is C or S
  MOD_RES (21), (22), (23), (24), (25): Xaa is A or G
  MOD_RES (26), (27), (28), (29): Xaa is A or G or is absent

SEQ ID NO: 80614 - protein, 34 aa, Artificial Sequence; identical to SEQ ID NO: 7305
  GFR-binding peptide
  MOD_RES (1), (2): Xaa is C or S
  MOD_RES (16), (17), (18), (19), (20): Xaa is A or G
  MOD_RES (21), (22), (23), (24): Xaa is A or G or is absent

SEQ ID NO: 80615 - protein, 37 aa, Artificial Sequence
  GFR-binding peptide
  MOD_RES (1), (2), (34), (36): Xaa is C or S
XXVPEKMSAISILYLDENKNVVLKNYQNMTVESXAXR

SEQ ID NO: 80616 - protein, 37 aa, Artificial Sequence; identical to SEQ ID NO: 9075
  GFR-binding peptide
  MOD_RES (1), (2), (34), (36): Xaa is C or S

SEQ ID NO: 80617 - protein, 39 aa, Artificial Sequence; identical to SEQ ID NO: 7308
  GFR-binding peptide
  MOD_RES (3), (4), (38): Xaa is C or S
  MOD_RES (18), (19), (20), (21), (22): Xaa is A or G
  MOD_RES (23), (24), (25), (26): Xaa is A or G or is absent

SEQ ID NO: 80618 - protein, 35 aa, Artificial Sequence; identical to SEQ ID NO: 28490
  GFR-binding peptide
  MOD_RES (2), (3), (35): Xaa is C or S

SEQ ID NO: 80619 - protein, 36 aa, Artificial Sequence; identical to SEQ ID NO: 9079
  GFR-binding peptide
  MOD_RES (1), (35): Xaa is C or S
  MOD_RES (15), (16), (17), (18), (19): Xaa is A or G
  MOD_RES (20), (21), (22), (23): Xaa is A or G or is absent

SEQ ID NO: 80620 - protein, 31 aa, Artificial Sequence; identical to SEQ ID NO: 9080
  GFR-binding peptide
  MOD_RES (1), (1): Xaa is C or S

SEQ ID NO: 80621 - protein, 44 aa, Artificial Sequence; identical to SEQ ID NO: 9081
  GFR-binding peptide
  MOD_RES (5), (6), (41), (43): Xaa is C or S
  MOD_RES (20), (21), (22), (23), (24): Xaa is A or G
  MOD_RES (25), (26), (27), (28): Xaa is A or G or is absent

SEQ ID NO: 80622 - protein, 37 aa, Artificial Sequence; identical to SEQ ID NO: 57469
  GFR-binding peptide
  MOD_RES (4), (5), (37): Xaa is C or S

SEQ ID NO: 80623 - protein, 41 aa, Artificial Sequence; identical to SEQ ID NO: 9083
  GFR-binding peptide
  MOD_RES (6), (7), (39), (41): Xaa is C or S

SEQ ID NO: 80624 - protein, 41 aa, Artificial Sequence
  GFR-binding peptide
  MOD_RES (5), (6), (40): Xaa is C or S
  MOD_RES (20), (21), (22), (23), (24): Xaa is A or G
  MOD_RES (25), (26), (27), (28): Xaa is A or G or is absent
ASKAXXVPTKLSAISILYLXXXXXXXXXLKNYQGMAVSEXG

SEQ ID NO: 80625 - protein, 41 aa, Artificial Sequence
  GFR-binding peptide
  MOD_RES (4), (5), (39), (41): Xaa is C or S
  MOD_RES (19), (20), (21), (22), (23): Xaa is A or G
  MOD_RES (24), (25), (26), (27): Xaa is A or G or is absent
AGPXXTPTKMSAISMLYLXXXXXXXXXLKNYQGMVVDRXGX

SEQ ID NO: 80626 - protein, 36 aa, Artificial Sequence; identical to SEQ ID NO: 9085
  GFR-binding peptide
  MOD_RES (3), (4): Xaa is C or S
  MOD_RES (18), (19), (20), (21), (22): Xaa is A or G
  MOD_RES (23), (24), (25), (26): Xaa is A or G or is absent

SEQ ID NO: 80627 - protein, 38 aa, Artificial Sequence
  GFR-binding peptide
  MOD_RES (6), (7): Xaa is C or S
AAPASXXVPARLSAISILYLDAANNVVLKNYQDMVVEA

SEQ ID NO: 80628 - protein, 43 aa, Artificial Sequence; identical to SEQ ID NO: 30466
  GFR-binding peptide
  MOD_RES (6), (7), (41), (43): Xaa is C or S
  MOD_RES (21), (22), (23), (24), (25): Xaa is A or G
  MOD_RES (26), (27), (28), (29): Xaa is A or G or is absent

SEQ ID NO: 80629 - protein, 35 aa, Artificial Sequence; identical to SEQ ID NO: 14610
  GFR-binding peptide
  MOD_RES (4), (5): Xaa is C or S

SEQ ID NO: 80630 - protein, 31 aa, Artificial Sequence
  GFR-binding peptide
  MOD_RES (1), (1): Xaa is C or S
XAPVKTSAISMLYLDNGRVLLLKNYQMIVEE

SEQ ID NO: 80631 - protein, 34 aa, Artificial Sequence; identical to SEQ ID NO: 57478
  GFR-binding peptide
  MOD_RES (1), (2): Xaa is C or S
  MOD_RES (16), (17), (18), (19), (20): Xaa is A or G
  MOD_RES (21), (22), (23), (24): Xaa is A or G or is absent

SEQ ID NO: 80632 - protein, 34 aa, Artificial Sequence
  GFR-binding peptide
  MOD_RES (1), (2), (34): Xaa is C or S
XXTPTKMSAISMLYLNDKQQIILKNYQGMVVDRX

SEQ ID NO: 80633 - protein, 33 aa, Artificial Sequence
  GFR-binding peptide
  MOD_RES (14), (15), (16), (17), (18): Xaa is A or G
  MOD_RES (19), (20), (21), (22): Xaa is A or G or is absent
TPTKMSAISMLYLXXXXXXXXXLKNYQGMVVDR

SEQ ID NO: 80634 - protein, 40 aa, Artificial Sequence
  GFR-binding peptide
  MOD_RES (3), (4), (38), (40): Xaa is C or S
  MOD_RES (18), (19), (20), (21), (22): Xaa is A or G
  MOD_RES (23), (24), (25), (26): Xaa is A or G or is absent
ASXXVPARLSAISILYLXXXXXXXXXLKNYQDMVVEAXGX

SEQ ID NO: 80635 - protein, 36 aa, Artificial Sequence
  GFR-binding peptide
  MOD_RES (34), (36): Xaa is C or S
  MOD_RES (14), (15), (16), (17), (18): Xaa is A or G
  MOD_RES (19), (20), (21), (22): Xaa is A or G or is absent
VPEKMSAISILYLXXXXXXXXXLKNYQNMTVESXAX

SEQ ID NO: 80636 - protein, 35 aa, Artificial Sequence; identical to SEQ ID NO: 57483
  GFR-binding peptide
  MOD_RES (2), (3): Xaa is C or S
  MOD_RES (17), (18), (19), (20), (21): Xaa is A or G
  MOD_RES (22), (23), (24), (25): Xaa is A or G or is absent

SEQ ID NO: 80637 - protein, 34 aa, Artificial Sequence; identical to SEQ ID NO: 7319
  GFR-binding peptide
  MOD_RES (3), (3): Xaa is C or S

SEQ ID NO: 80638 - protein, 36 aa, Artificial Sequence; identical to SEQ ID NO: 28506
  GFR-binding peptide
  MOD_RES (34), (36): Xaa is C or S
  MOD_RES (14), (15), (16), (17), (18): Xaa is A or G
  MOD_RES (19), (20), (21), (22): Xaa is A or G or is absent

SEQ ID NO: 80639 - protein, 39 aa, Artificial Sequence; identical to SEQ ID NO: 28507
  GFR-binding peptide
  MOD_RES (4), (5), (39): Xaa is C or S
  MOD_RES (19), (20), (21), (22), (23): Xaa is A or G
  MOD_RES (24), (25), (26), (27): Xaa is A or G or is absent

SEQ ID NO: 80640 - protein, 36 aa, Artificial Sequence; identical to SEQ ID NO: 9099
  GFR-binding peptide
  MOD_RES (1), (2), (36): Xaa is C or S
  MOD_RES (16), (17), (18), (19), (20): Xaa is A or G
  MOD_RES (21), (22), (23), (24): Xaa is A or G or is absent

SEQ ID NO: 80641 - protein, 31 aa, Artificial Sequence
  GFR-binding peptide
VPTKLSAISILYLDKGVVTYLKNYQGMAVSE

SEQ ID NO: 80642 - protein, 34 aa, Artificial Sequence; identical to SEQ ID NO: 7321
  GFR-binding peptide
  MOD_RES (1), (1): Xaa is C or S
  MOD_RES (15), (16), (17), (18), (19): Xaa is A or G
  MOD_RES (20), (21), (22), (23): Xaa is A or G or is absent

SEQ ID NO: 80643 - protein, 37 aa, Artificial Sequence; identical to SEQ ID NO: 7322
  GFR-binding peptide
  MOD_RES (2), (3), (34), (36): Xaa is C or S

SEQ ID NO: 80644 - protein, 37 aa, Artificial Sequence; identical to SEQ ID NO: 7323
  GFR-binding peptide
  MOD_RES (1), (2), (35), (37): Xaa is C or S
  MOD_RES (16), (17), (18), (19), (20): Xaa is A or G
  MOD_RES (21), (22), (23), (24): Xaa is A or G or is absent

SEQ ID NO: 80645 - protein, 34 aa, Artificial Sequence; identical to SEQ ID NO: 7324
  GFR-binding peptide
  MOD_RES (1), (33): Xaa is C or S

SEQ ID NO: 80646 - protein, 35 aa, Artificial Sequence; identical to SEQ ID NO: 68003
  GFR-binding peptide
  MOD_RES (2), (3): Xaa is C or S
  MOD_RES (17), (18), (19), (20), (21): Xaa is A or G
  MOD_RES (22), (23), (24), (25): Xaa is A or G or is absent

SEQ ID NO: 80647 - protein, 32 aa, Artificial Sequence; identical to SEQ ID NO: 9100
  GFR-binding peptide
  MOD_RES (1), (2): Xaa is C or S

SEQ ID NO: 80648 - protein, 41 aa, Artificial Sequence
  GFR-binding peptide
  MOD_RES (4), (5), (39), (41): Xaa is C or S
  MOD_RES (19), (20), (21), (22), (23): Xaa is A or G
  MOD_RES (24), (25), (26), (27): Xaa is A or G or is absent
SKAXXVPTKLSAISILYLXXXXXXXXXLKNYQGMAVSEXGX

SEQ ID NO: 80649 - protein, 38 aa, Artificial Sequence; identical to SEQ ID NO: 9101
  GFR-binding peptide
  MOD_RES (1), (35), (37): Xaa is C or S
  MOD_RES (15), (16), (17), (18), (19): Xaa is A or G
  MOD_RES (20), (21), (22), (23): Xaa is A or G or is absent

SEQ ID NO: 80650 - protein, 32 aa, Artificial Sequence; identical to SEQ ID NO: 71333
  GFR-binding peptide
  MOD_RES (32), (32): Xaa is C or S

SEQ ID NO: 80651 - protein, 37 aa, Artificial Sequence; identical to SEQ ID NO: 16387
  GFR-binding peptide
  MOD_RES (2), (3), (37): Xaa is C or S
  MOD_RES (17), (18), (19), (20), (21): Xaa is A or G
  MOD_RES (22), (23), (24), (25): Xaa is A or G or is absent

SEQ ID NO: 80652 - protein, 41 aa, Artificial Sequence; identical to SEQ ID NO: 7327
  GFR-binding peptide
  MOD_RES (4), (5), (38), (40): Xaa is C or S
  MOD_RES (19), (20), (21), (22), (23): Xaa is A or G
  MOD_RES (24), (25), (26), (27): Xaa is A or G or is absent

SEQ ID NO: 80653 - protein, 40 aa, Artificial Sequence; identical to SEQ ID NO: 7328
  GFR-binding peptide
  MOD_RES (6), (7), (39): Xaa is C or S

SEQ ID NO: 80654 - protein, 41 aa, Artificial Sequence
  GFR-binding peptide
  MOD_RES (5), (6), (38), (40): Xaa is C or S
SAGPXXTPTKMSAISMLYLNDKQQIILKNYQGMVVDRXGXS

SEQ ID NO: 80655 - protein, 34 aa, Artificial Sequence
  GFR-binding peptide
  MOD_RES (1), (32), (34): Xaa is C or S
XAPVKTSAISMLYLDNGRVLLLKNYQMIVEEXGX

SEQ ID NO: 80656 - protein, 35 aa, Artificial Sequence; identical to SEQ ID NO: 9104
  GFR-binding peptide
  MOD_RES (33), (35): Xaa is C or S
  MOD_RES (14), (15), (16), (17), (18): Xaa is A or G
  MOD_RES (19), (20), (21), (22): Xaa is A or G or is absent

SEQ ID NO: 80657 - protein, 33 aa, Artificial Sequence; identical to SEQ ID NO: 16389
  GFR-binding peptide
  MOD_RES (14), (15), (16), (17), (18): Xaa is A or G
  MOD_RES (19), (20), (21), (22): Xaa is A or G or is absent

SEQ ID NO: 80658 - protein, 34 aa, Artificial Sequence; identical to SEQ ID NO: 7329
  GFR-binding peptide
  MOD_RES (2), (3), (34): Xaa is C or S

SEQ ID NO: 80659 - protein, 33 aa, Artificial Sequence; identical to SEQ ID NO: 9107
  GFR-binding peptide
  MOD_RES (14), (15), (16), (17), (18): Xaa is A or G
  MOD_RES (19), (20), (21), (22): Xaa is A or G or is absent

SEQ ID NO: 80660 - protein, 34 aa, Artificial Sequence; identical to SEQ ID NO: 9108
  GFR-binding peptide
  MOD_RES (1), (33): Xaa is C or S

SEQ ID NO: 80661 - protein, 38 aa, Artificial Sequence; identical to SEQ ID NO: 28520
  GFR-binding peptide
  MOD_RES (2), (3), (35), (37): Xaa is C or S

SEQ ID NO: 80662 - protein, 36 aa, Artificial Sequence; identical to SEQ ID NO: 7332
  GFR-binding peptide
  MOD_RES (2), (3), (34), (36): Xaa is C or S

SEQ ID NO: 80663 - protein, 41 aa, Artificial Sequence; identical to SEQ ID NO: 9110
  GFR-binding peptide
  MOD_RES (4), (5), (39), (41): Xaa is C or S
  MOD_RES (19), (20), (21), (22), (23): Xaa is A or G
  MOD_RES (24), (25), (26), (27): Xaa is A or G or is absent

SEQ ID NO: 80664 - protein, 35 aa, Artificial Sequence; identical to SEQ ID NO: 28524
  GFR-binding peptide
  MOD_RES (2), (3), (35): Xaa is C or S

SEQ ID NO: 80665 - protein, 38 aa, Artificial Sequence; identical to SEQ ID NO: 7333
  GFR-binding peptide
  MOD_RES (3), (4), (35), (37): Xaa is C or S

SEQ ID NO: 80666 - protein, 31 aa, Artificial Sequence; identical to SEQ ID NO: 9111
  GFR-binding peptide
  MOD_RES (31), (31): Xaa is C or S

SEQ ID NO: 80667 - protein, 40 aa, Artificial Sequence; identical to SEQ ID NO: 9113
  GFR-binding peptide
  MOD_RES (5), (6), (39): Xaa is C or S
  MOD_RES (20), (21), (22), (23), (24): Xaa is A or G
  MOD_RES (25), (26), (27), (28): Xaa is A or G or is absent

SEQ ID NO: 80668 - protein, 38 aa, Artificial Sequence; identical to SEQ ID NO: 7334
  GFR-binding peptide
  MOD_RES (4), (5): Xaa is C or S
  MOD_RES (19), (20), (21), (22), (23): Xaa is A or G
  MOD_RES (24), (25), (26), (27): Xaa is A or G or is absent

SEQ ID NO: 80669 - protein, 41 aa, Artificial Sequence; identical to SEQ ID NO: 9114
  GFR-binding peptide
  MOD_RES (4), (5), (38), (40): Xaa is C or S

SEQ ID NO: 80670 - protein, 36 aa, Artificial Sequence; identical to SEQ ID NO: 7335
  GFR-binding peptide
  MOD_RES (4), (5): Xaa is C or S

SEQ ID NO: 80671 - protein, 32 aa, Artificial Sequence; identical to SEQ ID NO: 57500
  GFR-binding peptide
  MOD_RES (14), (15), (16), (17), (18): Xaa is A or G
  MOD_RES (19), (20), (21), (22): Xaa is A or G or is absent

SEQ ID NO: 80672 - protein, 33 aa, Artificial Sequence; identical to SEQ ID NO: 16397
  GFR-binding peptide
  MOD_RES (14), (15), (16), (17), (18): Xaa is A or G
  MOD_RES (19), (20), (21), (22): Xaa is A or G or is absent

SEQ ID NO: 80673 - protein, 36 aa, Artificial Sequence; identical to SEQ ID NO: 9117
  GFR-binding peptide
  MOD_RES (34), (36): Xaa is C or S
  MOD_RES (14), (15), (16), (17), (18): Xaa is A or G
  MOD_RES (19), (20), (21), (22): Xaa is A or G or is absent

SEQ ID NO: 80674 - protein, 38 aa, Artificial Sequence; identical to SEQ ID NO: 7336
  GFR-binding peptide
  MOD_RES (4), (5): Xaa is C or S
  MOD_RES (19), (20), (21), (22), (23): Xaa is A or G
  MOD_RES (24), (25), (26), (27): Xaa is A or G or is absent

SEQ ID NO: 80675 - protein, 39 aa, Artificial Sequence; identical to SEQ ID NO: 9118
  GFR-binding peptide
  MOD_RES (1), (36), (38): Xaa is C or S
  MOD_RES (15), (16), (17), (18), (19): Xaa is A or G
  MOD_RES (20), (21), (22), (23): Xaa is A or G or is absent

SEQ ID NO: 80676 - protein, 34 aa, Artificial Sequence; identical to SEQ ID NO: 28529
  GFR-binding peptide
  MOD_RES (3), (4): Xaa is C or S

SEQ ID NO: 80677 - protein, 38 aa, Artificial Sequence; identical to SEQ ID NO: 57505
  GFR-binding peptide
  MOD_RES (3), (4), (35), (37): Xaa is C or S

SEQ ID NO: 80678 - protein, 40 aa, Artificial Sequence
  GFR-binding peptide
  MOD_RES (4), (5), (39): Xaa is C or S
  MOD_RES (19), (20), (21), (22), (23): Xaa is A or G
  MOD_RES (24), (25), (26), (27): Xaa is A or G or is absent
PEPXXVPEKMSAISILYLXXXXXXXXXLKNYQNMTVESXA

SEQ ID NO: 80679 - protein, 38 aa, Artificial Sequence
  GFR-binding peptide
  MOD_RES (5), (6): Xaa is C or S
  MOD_RES (20), (21), (22), (23), (24): Xaa is A or G
  MOD_RES (25), (26), (27), (28): Xaa is A or G or is absent
ASKAXXVPTKLSAISILYLXXXXXXXXXLKNYQGMAVS

SEQ ID NO: 80680 - protein, 36 aa, Artificial Sequence; identical to SEQ ID NO: 7341
  GFR-binding peptide
  MOD_RES (4), (5): Xaa is C or S

SEQ ID NO: 80681 - protein, 38 aa, Artificial Sequence; identical to SEQ ID NO: 28532
  GFR-binding peptide
  MOD_RES (4), (5), (37): Xaa is C or S

SEQ ID NO: 80682 - protein, 31 aa, Artificial Sequence; identical to SEQ ID NO: 57511
  GFR-binding peptide

SEQ ID NO: 80683 - protein, 40 aa, Artificial Sequence; identical to SEQ ID NO: 16402
  GFR-binding peptide
  MOD_RES (6), (7): Xaa is C or S
  MOD_RES (21), (22), (23), (24), (25): Xaa is A or G
  MOD_RES (26), (27), (28), (29): Xaa is A or G or is absent

SEQ ID NO: 80684 - protein, 39 aa, Artificial Sequence; identical to SEQ ID NO: 9125
  GFR-binding peptide
  MOD_RES (3), (4), (39): Xaa is C or S
  MOD_RES (18), (19), (20), (21), (22): Xaa is A or G
  MOD_RES (23), (24), (25), (26): Xaa is A or G or is absent

SEQ ID NO: 80685 - protein, 38 aa, Artificial Sequence; identical to SEQ ID NO: 28537
  GFR-binding peptide
  MOD_RES (1), (2), (36), (38): Xaa is C or S
  MOD_RES (16), (17), (18), (19), (20): Xaa is A or G
  MOD_RES (21), (22), (23), (24): Xaa is A or G or is absent

SEQ ID NO: 80686 - protein, 34 aa, Artificial Sequence; identical to SEQ ID NO: 30496
  GFR-binding peptide
  MOD_RES (1), (2): Xaa is C or S
  MOD_RES (16), (17), (18), (19), (20): Xaa is A or G
  MOD_RES (21), (22), (23), (24): Xaa is A or G or is absent

SEQ ID NO: 80687 - protein, 43 aa, Artificial Sequence; identical to SEQ ID NO: 14637
  GFR-binding peptide
  MOD_RES (6), (7), (41), (43): Xaa is C or S
  MOD_RES (21), (22), (23), (24), (25): Xaa is A or G
  MOD_RES (26), (27), (28), (29): Xaa is A or G or is absent

SEQ ID NO: 80688 - protein, 37 aa, Artificial Sequence; identical to SEQ ID NO: 7343
  GFR-binding peptide
  MOD_RES (2), (3), (36): Xaa is C or S

SEQ ID NO: 80689 - protein, 37 aa, Artificial Sequence; identical to SEQ ID NO: 9128
  GFR-binding peptide
  MOD_RES (4), (5), (36): Xaa is C or S

SEQ ID NO: 80690 - protein, 35 aa, Artificial Sequence
  GFR-binding peptide
  MOD_RES (1), (2): Xaa is C or S
  MOD_RES (16), (17), (18), (19), (20): Xaa is A or G
  MOD_RES (21), (22), (23), (24): Xaa is A or G or is absent
XXVPARLSAISILYLXXXXXXXXXLKNYQDMVVEA

SEQ ID NO: 80691 - protein, 38 aa, Artificial Sequence
  GFR-binding peptide
  MOD_RES (5), (6), (38): Xaa is C or S
SAGPXXTPTKMSAISMLYLNDKQQIILKNYQGMVVDRX

SEQ ID NO: 80692 - protein, 36 aa, Artificial Sequence
  GFR-binding peptide
  MOD_RES (2), (3): Xaa is C or S
  MOD_RES (17), (18), (19), (20), (21): Xaa is A or G
  MOD_RES (22), (23), (24), (25): Xaa is A or G or is absent
PXXVPEKMSAISILYLXXXXXXXXXLKNYQNMTVES

SEQ ID NO: 80693 - protein, 44 aa, Artificial Sequence; identical to SEQ ID NO: 9131
  GFR-binding peptide
  MOD_RES (6), (7), (41), (43): Xaa is C or S
  MOD_RES (21), (22), (23), (24), (25): Xaa is A or G
  MOD_RES (26), (27), (28), (29): Xaa is A or G or is absent

SEQ ID NO: 80694 - protein, 38 aa, Artificial Sequence; identical to SEQ ID NO: 9133
  GFR-binding peptide
  MOD_RES (5), (6), (38): Xaa is C or S

SEQ ID NO: 80695 - protein, 37 aa, Artificial Sequence; identical to SEQ ID NO: 9134
  GFR-binding peptide
  MOD_RES (3), (4), (37): Xaa is C or S
  MOD_RES (18), (19), (20), (21), (22): Xaa is A or G
  MOD_RES (23), (24), (25), (26): Xaa is A or G or is absent

SEQ ID NO: 80696 - protein, 38 aa, Artificial Sequence; identical to SEQ ID NO: 7347
  GFR-binding peptide
  MOD_RES (3), (4), (36), (38): Xaa is C or S

SEQ ID NO: 80697 - protein, 38 aa, Artificial Sequence; identical to SEQ ID NO: 9135
  GFR-binding peptide
  MOD_RES (1), (2), (35), (37): Xaa is C or S

SEQ ID NO: 80698 - protein, 41 aa, Artificial Sequence; identical to SEQ ID NO: 14640
  GFR-binding peptide
  MOD_RES (5), (6), (40): Xaa is C or S
  MOD_RES (20), (21), (22), (23), (24): Xaa is A or G
  MOD_RES (25), (26), (27), (28): Xaa is A or G or is absent

SEQ ID NO: 80699 - protein, 39 aa, Artificial Sequence; identical to SEQ ID NO: 71366
  GFR-binding peptide
  MOD_RES (2), (3), (37), (39): Xaa is C or S
  MOD_RES (17), (18), (19), (20), (21): Xaa is A or G
  MOD_RES (22), (23), (24), (25): Xaa is A or G or is absent

SEQ ID NO: 80700 - protein, 34 aa, Artificial Sequence; identical to SEQ ID NO: 7350
  GFR-binding peptide
  MOD_RES (1), (2), (33): Xaa is C or S

SEQ ID NO: 80701 - protein, 39 aa, Artificial Sequence; identical to SEQ ID NO: 9138
  GFR-binding peptide
  MOD_RES (4), (5), (38): Xaa is C or S
  MOD_RES (19), (20), (21), (22), (23): Xaa is A or G
  MOD_RES (24), (25), (26), (27): Xaa is A or G or is absent

SEQ ID NO: 80702 - protein, 39 aa, Artificial Sequence; identical to SEQ ID NO: 9139
  GFR-binding peptide
  MOD_RES (2), (3), (38): Xaa is C or S
  MOD_RES (17), (18), (19), (20), (21): Xaa is A or G
  MOD_RES (22), (23), (24), (25): Xaa is A or G or is absent

SEQ ID NO: 80703 - protein, 38 aa, Artificial Sequence; identical to SEQ ID NO: 57529
  GFR-binding peptide
  MOD_RES (1), (2), (35), (37): Xaa is C or S
  MOD_RES (16), (17), (18), (19), (20): Xaa is A or G
  MOD_RES (21), (22), (23), (24): Xaa is A or G or is absent

SEQ ID NO: 80704 - protein, 39 aa, Artificial Sequence; identical to SEQ ID NO: 7351
  GFR-binding peptide
  MOD_RES (4), (5), (39): Xaa is C or S
  MOD_RES (19), (20), (21), (22), (23): Xaa is A or G
  MOD_RES (24), (25), (26), (27): Xaa is A or G or is absent

SEQ ID NO: 80705 - protein, 38 aa, Artificial Sequence; identical to SEQ ID NO: 30507
  GFR-binding peptide
  MOD_RES (5), (6), (38): Xaa is C or S

SEQ ID NO: 80706 - protein, 36 aa, Artificial Sequence
  GFR-binding peptide
  MOD_RES (3), (4): Xaa is C or S
  MOD_RES (18), (19), (20), (21), (22): Xaa is A or G
  MOD_RES (23), (24), (25), (26): Xaa is A or G or is absent
STXXAPVKTSAISMLYLXXXXXXXXXLKNYQMIVEE

SEQ ID NO: 80707 - protein, 34 aa, Artificial Sequence; identical to SEQ ID NO: 7352
  GFR-binding peptide
  MOD_RES (33), (33): Xaa is C or S
  MOD_RES (14), (15), (16), (17), (18): Xaa is A or G
  MOD_RES (19), (20), (21), (22): Xaa is A or G or is absent

SEQ ID NO: 80708 - protein, 32 aa, Artificial Sequence; identical to SEQ ID NO: 9146
  GFR-binding peptide
  MOD_RES (1), (2): Xaa is C or S

SEQ ID NO: 80709 - protein, 40 aa, Artificial Sequence; identical to SEQ ID NO: 9148
  GFR-binding peptide
  MOD_RES (3), (37), (39): Xaa is C or S
  MOD_RES (17), (18), (19), (20), (21): Xaa is A or G
  MOD_RES (22), (23), (24), (25): Xaa is A or G or is absent

SEQ ID NO: 80710 - protein, 42 aa, Artificial Sequence; identical to SEQ ID NO: 9149
  GFR-binding peptide
  MOD_RES (4), (5), (39), (41): Xaa is C or S
  MOD_RES (19), (20), (21), (22), (23): Xaa is A or G
  MOD_RES (24), (25), (26), (27): Xaa is A or G or is absent

SEQ ID NO: 80711 - protein, 35 aa, Artificial Sequence; identical to SEQ ID NO: 9152
  GFR-binding peptide
  MOD_RES (34), (34): Xaa is C or S
  MOD_RES (14), (15), (16), (17), (18): Xaa is A or G
  MOD_RES (19), (20), (21), (22): Xaa is A or G or is absent

SEQ ID NO: 80712 - protein, 40 aa, Artificial Sequence; identical to SEQ ID NO: 7353
  GFR-binding peptide
  MOD_RES (2), (3), (37), (39): Xaa is C or S
  MOD_RES (17), (18), (19), (20), (21): Xaa is A or G
  MOD_RES (22), (23), (24), (25): Xaa is A or G or is absent

SEQ ID NO: 80713 - protein, 34 aa, Artificial Sequence; identical to SEQ ID NO: 30510
  GFR-binding peptide
  MOD_RES (32), (34): Xaa is C or S

SEQ ID NO: 80714 - protein, 34 aa, Artificial Sequence; identical to SEQ ID NO: 9153
  GFR-binding peptide
  MOD_RES (33), (33): Xaa is C or S
  MOD_RES (14), (15), (16), (17), (18): Xaa is A or G
  MOD_RES (19), (20), (21), (22): Xaa is A or G or is absent

SEQ ID NO: 80715 - protein, 39 aa, Artificial Sequence
  GFR-binding peptide
  MOD_RES (6), (7): Xaa is C or S
  MOD_RES (21), (22), (23), (24), (25): Xaa is A or G
  MOD_RES (26), (27), (28), (29): Xaa is A or G or is absent
HVPKPXXAPTKLSAISVLYLXXXXXXXXXLKNYQNMVVR

SEQ ID NO: 80716 - protein, 34 aa, Artificial Sequence; identical to SEQ ID NO: 7354
  GFR-binding peptide
  MOD_RES (2), (3): Xaa is C or S

SEQ ID NO: 80717 - protein, 38 aa, Artificial Sequence
  GFR-binding peptide
  MOD_RES (3), (4), (36), (38): Xaa is C or S
ASXXVPARLSAISILYLDAANNVVLKNYQDMVVEAXGX

SEQ ID NO: 80718 - protein, 39 aa, Artificial Sequence; identical to SEQ ID NO: 28559
  GFR-binding peptide
  MOD_RES (3), (4), (38): Xaa is C or S
  MOD_RES (18), (19), (20), (21), (22): Xaa is A or G
  MOD_RES (23), (24), (25), (26): Xaa is A or G or is absent

SEQ ID NO: 80719 - protein, 39 aa, Artificial Sequence; identical to SEQ ID NO: 9155
  GFR-binding peptide
  MOD_RES (4), (5), (39): Xaa is C or S
  MOD_RES (19), (20), (21), (22), (23): Xaa is A or G
  MOD_RES (24), (25), (26), (27): Xaa is A or G or is absent

SEQ ID NO: 80720 - protein, 37 aa, Artificial Sequence; identical to SEQ ID NO: 7355
  GFR-binding peptide
  MOD_RES (1), (34), (36): Xaa is C or S

SEQ ID NO: 80721 - protein, 40 aa, Artificial Sequence; identical to SEQ ID NO: 9156
  GFR-binding peptide
  MOD_RES (2), (3), (38), (40): Xaa is C or S
  MOD_RES (17), (18), (19), (20), (21): Xaa is A or G
  MOD_RES (22), (23), (24), (25): Xaa is A or G or is absent

SEQ ID NO: 80722 - protein, 35 aa, Artificial Sequence; identical to SEQ ID NO: 9157
  GFR-binding peptide
  MOD_RES (34), (34): Xaa is C or S
  MOD_RES (14), (15), (16), (17), (18): Xaa is A or G
  MOD_RES (19), (20), (21), (22): Xaa is A or G or is absent

SEQ ID NO: 80723 - protein, 36 aa, Artificial Sequence
  GFR-binding peptide
  MOD_RES (1), (2), (36): Xaa is C or S
  MOD_RES (16), (17), (18), (19), (20): Xaa is A or G
  MOD_RES (21), (22), (23), (24): Xaa is A or G or is absent
XXTPTKMSAISMLYLXXXXXXXXXLKNYQGMVVDRX

SEQ ID NO: 80724 - protein, 41 aa, Artificial Sequence; identical to SEQ ID NO: 7358
  GFR-binding peptide
  MOD_RES (5), (6), (39), (41): Xaa is C or S

SEQ ID NO: 80725 - protein, 39 aa, Artificial Sequence; identical to SEQ ID NO: 7359
  GFR-binding peptide
  MOD_RES (6), (7), (38): Xaa is C or S

SEQ ID NO: 80726 - protein, 40 aa, Artificial Sequence; identical to SEQ ID NO: 9161
  GFR-binding peptide
  MOD_RES (4), (5), (38), (40): Xaa is C or S
  MOD_RES (19), (20), (21), (22), (23): Xaa is A or G
  MOD_RES (24), (25), (26), (27): Xaa is A or G or is absent

SEQ ID NO: 80727 - protein, 35 aa, Artificial Sequence; identical to SEQ ID NO: 28572
  GFR-binding peptide
  MOD_RES (1), (2): Xaa is C or S
  MOD_RES (16), (17), (18), (19), (20): Xaa is A or G
  MOD_RES (21), (22), (23), (24): Xaa is A or G or is absent

SEQ ID NO: 80728 - protein, 39 aa, Artificial Sequence; identical to SEQ ID NO: 7363
  GFR-binding peptide
  MOD_RES (2), (3), (37), (39): Xaa is C or S
  MOD_RES (17), (18), (19), (20), (21): Xaa is A or G
  MOD_RES (22), (23), (24), (25): Xaa is A or G or is absent

SEQ ID NO: 80729 - protein, 36 aa, Artificial Sequence; identical to SEQ ID NO: 9162
  GFR-binding peptide
  MOD_RES (1), (35): Xaa is C or S
  MOD_RES (15), (16), (17), (18), (19): Xaa is A or G
  MOD_RES (20), (21), (22), (23): Xaa is A or G or is absent

SEQ ID NO: 80730 - protein, 35 aa, Artificial Sequence; identical to SEQ ID NO: 7365
  GFR-binding peptide
  MOD_RES (32), (34): Xaa is C or S

SEQ ID NO: 80731 - protein, 36 aa, Artificial Sequence; identical to SEQ ID NO: 30526
  GFR-binding peptide
  MOD_RES (3), (4), (36): Xaa is C or S

SEQ ID NO: 80732 - protein, 36 aa, Artificial Sequence; identical to SEQ ID NO: 7366
  GFR-binding peptide
  MOD_RES (5), (6): Xaa is C or S

SEQ ID NO: 80733 - protein, 40 aa, Artificial Sequence; identical to SEQ ID NO: 16439
  GFR-binding peptide
  MOD_RES (6), (7): Xaa is C or S
  MOD_RES (21), (22), (23), (24), (25): Xaa is A or G
  MOD_RES (26), (27), (28), (29): Xaa is A or G or is absent

SEQ ID NO: 80734 - protein, 33 aa, Artificial Sequence; identical to SEQ ID NO: 14670
  GFR-binding peptide
  MOD_RES (1), (2): Xaa is C or S

SEQ ID NO: 80735 - protein, 41 aa, Artificial Sequence; identical to SEQ ID NO: 9165
  GFR-binding peptide
  MOD_RES (6), (7), (41): Xaa is C or S
  MOD_RES (21), (22), (23), (24), (25): Xaa is A or G
  MOD_RES (26), (27), (28), (29): Xaa is A or G or is absent

SEQ ID NO: 80736 - protein, 32 aa, Artificial Sequence
  GFR-binding peptide
  MOD_RES (31), (31): Xaa is C or S
APVKTSAISMLYLDNGRVLLLKNYQMIVEEXG

SEQ ID NO: 80737 - protein, 38 aa, Artificial Sequence; identical to SEQ ID NO: 57557
  GFR-binding peptide
  MOD_RES (5), (6): Xaa is C or S
  MOD_RES (20), (21), (22), (23), (24): Xaa is A or G
  MOD_RES (25), (26), (27), (28): Xaa is A or G or is absent

SEQ ID NO: 80738 - protein, 37 aa, Artificial Sequence; identical to SEQ ID NO: 7370
  GFR-binding peptide
  MOD_RES (4), (5): Xaa is C or S
  MOD_RES (19), (20), (21), (22), (23): Xaa is A or G
  MOD_RES (24), (25), (26), (27): Xaa is A or G or is absent

SEQ ID NO: 80739 - protein, 32 aa, Artificial Sequence; identical to SEQ ID NO: 57558
  GFR-binding peptide
  MOD_RES (1), (2): Xaa is C or S

SEQ ID NO: 80740 - protein, 39 aa, Artificial Sequence; identical to SEQ ID NO: 57560
  GFR-binding peptide
  MOD_RES (4), (5), (37), (39): Xaa is C or S

SEQ ID NO: 80741 - protein, 30 aa, Artificial Sequence; identical to SEQ ID NO: 7373
  GFR-binding peptide

SEQ ID NO: 80742 - protein, 39 aa, Artificial Sequence; identical to SEQ ID NO: 9174
  GFR-binding peptide
  MOD_RES (3), (4), (37), (39): Xaa is C or S

SEQ ID NO: 80743 - protein, 38 aa, Artificial Sequence
  GFR-binding peptide
  MOD_RES (5), (6), (38): Xaa is C or S
IPEPXXVPEKMSAISILYLDENKNVVLKNYQNMTVESX

SEQ ID NO: 80744 - protein, 38 aa, Artificial Sequence
  GFR-binding peptide
  MOD_RES (2), (3), (35), (37): Xaa is C or S
SXXVPARLSAISILYLDAANNVVLKNYQDMVVEAXGXR

SEQ ID NO: 80745 - protein, 38 aa, Artificial Sequence; identical to SEQ ID NO: 7375
  GFR-binding peptide
  MOD_RES (3), (4), (35), (37): Xaa is C or S

SEQ ID NO: 80746 - protein, 40 aa, Artificial Sequence; identical to SEQ ID NO: 28585
  GFR-binding peptide
  MOD_RES (6), (7), (39): Xaa is C or S

SEQ ID NO: 80747 - protein, 36 aa, Artificial Sequence; identical to SEQ ID NO: 7377
  GFR-binding peptide
  MOD_RES (1), (2), (35): Xaa is C or S
  MOD_RES (16), (17), (18), (19), (20): Xaa is A or G
  MOD_RES (21), (22), (23), (24): Xaa is A or G or is absent

SEQ ID NO: 80748 - protein, 43 aa, Artificial Sequence
  GFR-binding peptide
  MOD_RES (6), (7), (41), (43): Xaa is C or S
  MOD_RES (21), (22), (23), (24), (25): Xaa is A or G
  MOD_RES (26), (27), (28), (29): Xaa is A or G or is absent
GSAGPXXTPTKMSAISMLYLXXXXXXXXXLKNYQGMVVDRXGX

SEQ ID NO: 80749 - protein, 40 aa, Artificial Sequence; identical to SEQ ID NO: 7378
  GFR-binding peptide
  MOD_RES (4), (5), (39): Xaa is C or S
  MOD_RES (19), (20), (21), (22), (23): Xaa is A or G
  MOD_RES (24), (25), (26), (27): Xaa is A or G or is absent

SEQ ID NO: 80750 - protein, 36 aa, Artificial Sequence
  GFR-binding peptide
  MOD_RES (1), (2), (33), (35): Xaa is C or S
XXAPVKTSAISMLYLDNGRVLLLKNYQMIVEEXGXL

SEQ ID NO: 80751 - protein, 42 aa, Artificial Sequence
  GFR-binding peptide
  MOD_RES (4), (5), (39), (41): Xaa is C or S
  MOD_RES (19), (20), (21), (22), (23): Xaa is A or G
  MOD_RES (24), (25), (26), (27): Xaa is A or G or is absent
PASXXVPARLSAISILYLXXXXXXXXXLKNYQDMVVEAXGXR

SEQ ID NO: 80752 - protein, 38 aa, Artificial Sequence; identical to SEQ ID NO: 16459
  GFR-binding peptide
  MOD_RES (4), (5), (37): Xaa is C or S

SEQ ID NO: 80753 - protein, 37 aa, Artificial Sequence; identical to SEQ ID NO: 7383
  GFR-binding peptide
  MOD_RES (3), (4): Xaa is C or S
  MOD_RES (18), (19), (20), (21), (22): Xaa is A or G
  MOD_RES (23), (24), (25), (26): Xaa is A or G or is absent

SEQ ID NO: 80754 - protein, 40 aa, Artificial Sequence
  GFR-binding peptide
  MOD_RES (6), (7): Xaa is C or S
  MOD_RES (21), (22), (23), (24), (25): Xaa is A or G
  MOD_RES (26), (27), (28), (29): Xaa is A or G or is absent
GSAGPXXTPTKMSAISMLYLXXXXXXXXXLKNYQGMVVDR

SEQ ID NO: 80755 - protein, 36 aa, Artificial Sequence; identical to SEQ ID NO: 7390
  GFR-binding peptide
  MOD_RES (1), (34), (36): Xaa is C or S
  MOD_RES (15), (16), (17), (18), (19): Xaa is A or G
  MOD_RES (20), (21), (22), (23): Xaa is A or G or is absent

SEQ ID NO: 80756 - protein, 38 aa, Artificial Sequence; identical to SEQ ID NO: 9182
  GFR-binding peptide
  MOD_RES (2), (3), (37): Xaa is C or S
  MOD_RES (17), (18), (19), (20), (21): Xaa is A or G
  MOD_RES (22), (23), (24), (25): Xaa is A or G or is absent

SEQ ID NO: 80757 - protein, 39 aa, Artificial Sequence; identical to SEQ ID NO: 30552
  GFR-binding peptide
  MOD_RES (6), (7): Xaa is C or S
  MOD_RES (21), (22), (23), (24), (25): Xaa is A or G
  MOD_RES (26), (27), (28), (29): Xaa is A or G or is absent

SEQ ID NO: 80758 - protein, 39 aa, Artificial Sequence; identical to SEQ ID NO: 7391
  GFR-binding peptide
  MOD_RES (5), (6), (38): Xaa is C or S

SEQ ID NO: 80759 - protein, 41 aa, Artificial Sequence; identical to SEQ ID NO: 7394
  GFR-binding peptide
  MOD_RES (5), (6), (39), (41): Xaa is C or S

SEQ ID NO: 80760 - protein, 39 aa, Artificial Sequence; identical to SEQ ID NO: 9186
  GFR-binding peptide
  MOD_RES (3), (4), (38): Xaa is C or S
  MOD_RES (18), (19), (20), (21), (22): Xaa is A or G
  MOD_RES (23), (24), (25), (26): Xaa is A or G or is absent

SEQ ID NO: 80761 - protein, 39 aa, Artificial Sequence; identical to SEQ ID NO: 9187
  GFR-binding peptide
  MOD_RES (5), (6): Xaa is C or S
  MOD_RES (20), (21), (22), (23), (24): Xaa is A or G
  MOD_RES (25), (26), (27), (28): Xaa is A or G or is absent

SEQ ID NO: 80762 - protein, 36 aa, Artificial Sequence; identical to SEQ ID NO: 28609
  GFR-binding peptide
  MOD_RES (4), (5): Xaa is C or S

SEQ ID NO: 80763 - protein, 38 aa, Artificial Sequence; identical to SEQ ID NO: 7397
  GFR-binding peptide
  MOD_RES (3), (35), (37): Xaa is C or S

SEQ ID NO: 80764 - protein, 38 aa, Artificial Sequence; identical to SEQ ID NO: 9188
  GFR-binding peptide
  MOD_RES (2), (3), (37): Xaa is C or S
  MOD_RES (17), (18), (19), (20), (21): Xaa is A or G
  MOD_RES (22), (23), (24), (25): Xaa is A or G or is absent

SEQ ID NO: 80765 - protein, 34 aa, Artificial Sequence; identical to SEQ ID NO: 16468
  GFR-binding peptide
  MOD_RES (3), (4): Xaa is C or S

SEQ ID NO: 80766 - protein, 35 aa, Artificial Sequence; identical to SEQ ID NO: 9191
  GFR-binding peptide
  MOD_RES (34), (34): Xaa is C or S
  MOD_RES (14), (15), (16), (17), (18): Xaa is A or G
  MOD_RES (19), (20), (21), (22): Xaa is A or G or is absent

SEQ ID NO: 80767 - protein, 42 aa, Artificial Sequence; identical to SEQ ID NO: 7401
  GFR-binding peptide
  MOD_RES (6), (7), (40), (42): Xaa is C or S
  MOD_RES (21), (22), (23), (24), (25): Xaa is A or G
  MOD_RES (26), (27), (28), (29): Xaa is A or G or is absent

SEQ ID NO: 80768 - protein, 40 aa, Artificial Sequence; identical to SEQ ID NO: 9192
  GFR-binding peptide
  MOD_RES (5), (6), (40): Xaa is C or S
  MOD_RES (20), (21), (22), (23), (24): Xaa is A or G
  MOD_RES (25), (26), (27), (28): Xaa is A or G or is absent

SEQ ID NO: 80769 - protein, 35 aa, Artificial Sequence
  GFR-binding peptide
  MOD_RES (2), (3), (35): Xaa is C or S
PXXVPEKMSAISILYLDENKNVVLKNYQNMTVESX

SEQ ID NO: 80770 - protein, 34 aa, Artificial Sequence; identical to SEQ ID NO: 28615
  GFR-binding peptide
  MOD_RES (34), (34): Xaa is C or S
  MOD_RES (14), (15), (16), (17), (18): Xaa is A or G
  MOD_RES (19), (20), (21), (22): Xaa is A or G or is absent

SEQ ID NO: 80771 - protein, 36 aa, Artificial Sequence; identical to SEQ ID NO: 57586
  GFR-binding peptide
  MOD_RES (2), (3), (36): Xaa is C or S
  MOD_RES (17), (18), (19), (20), (21): Xaa is A or G
  MOD_RES (22), (23), (24), (25): Xaa is A or G or is absent

SEQ ID NO: 80772 - protein, 40 aa, Artificial Sequence; identical to SEQ ID NO: 9195
  GFR-binding peptide
  MOD_RES (3), (4), (38), (40): Xaa is C or S
  MOD_RES (18), (19), (20), (21), (22): Xaa is A or G
  MOD_RES (23), (24), (25), (26): Xaa is A or G or is absent

SEQ ID NO: 80773 - protein, 34 aa, Artificial Sequence; identical to SEQ ID NO: 28617
  GFR-binding peptide
  MOD_RES (1), (1): Xaa is C or S
  MOD_RES (15), (16), (17), (18), (19): Xaa is A or G
  MOD_RES (20), (21), (22), (23): Xaa is A or G or is absent

SEQ ID NO: 80774 - protein, 38 aa, Artificial Sequence; identical to SEQ ID NO: 7407
  GFR-binding peptide
  MOD_RES (4), (5), (38): Xaa is C or S

SEQ ID NO: 80775 - protein, 31 aa, Artificial Sequence; identical to SEQ ID NO: 9197
  GFR-binding peptide

SEQ ID NO: 80776 - protein, 36 aa, Artificial Sequence; identical to SEQ ID NO: 9198
  GFR-binding peptide
  MOD_RES (1), (34), (36): Xaa is C or S
  MOD_RES (15), (16), (17), (18), (19): Xaa is A or G
  MOD_RES (20), (21), (22), (23): Xaa is A or G or is absent

SEQ ID NO: 80777 - protein, 39 aa, Artificial Sequence; identical to SEQ ID NO: 7408
  GFR-binding peptide
  MOD_RES (5), (6), (37), (39): Xaa is C or S

SEQ ID NO: 80778 - protein, 34 aa, Artificial Sequence; identical to SEQ ID NO: 9202
  GFR-binding peptide
  MOD_RES (31), (33): Xaa is C or S

SEQ ID NO: 80779 - protein, 36 aa, Artificial Sequence; identical to SEQ ID NO: 30575
  GFR-binding peptide
  MOD_RES (4), (5): Xaa is C or S

SEQ ID NO: 80780 - protein, 37 aa, Artificial Sequence; identical to SEQ ID NO: 30576
  GFR-binding peptide
  MOD_RES (34), (36): Xaa is C or S
  MOD_RES (14), (15), (16), (17), (18): Xaa is A or G
  MOD_RES (19), (20), (21), (22): Xaa is A or G or is absent

SEQ ID NO: 80781 - protein, 38 aa, Artificial Sequence; identical to SEQ ID NO: 14707
  GFR-binding peptide
  MOD_RES (4), (5), (37): Xaa is C or S

SEQ ID NO: 80782 - protein, 33 aa, Artificial Sequence
  GFR-binding peptide
  MOD_RES (1), (1): Xaa is C or S
  MOD_RES (15), (16), (17), (18), (19): Xaa is A or G
  MOD_RES (20), (21), (22), (23): Xaa is A or G or is absent
XAPVKTSAISMLYLXXXXXXXXXLKNYQMIVEE

SEQ ID NO: 80783 - protein, 34 aa, Artificial Sequence; identical to SEQ ID NO: 7413
  GFR-binding peptide
  MOD_RES (3), (4): Xaa is C or S

SEQ ID NO: 80784 - protein, 32 aa, Artificial Sequence; identical to SEQ ID NO: 30578
  GFR-binding peptide
  MOD_RES (1), (1): Xaa is C or S

SEQ ID NO: 80785 - protein, 34 aa, Artificial Sequence
  GFR-binding peptide
  MOD_RES (2), (3): Xaa is C or S
PXXVPEKMSAISILYLDENKNVVLKNYQNMTVES

SEQ ID NO: 80786 - protein, 36 aa, Artificial Sequence; identical to SEQ ID NO: 68099
  GFR-binding peptide
  MOD_RES (2), (3): Xaa is C or S
  MOD_RES (17), (18), (19), (20), (21): Xaa is A or G
  MOD_RES (22), (23), (24), (25): Xaa is A or G or is absent

SEQ ID NO: 80787 - protein, 38 aa, Artificial Sequence; identical to SEQ ID NO: 28627
  GFR-binding peptide
  MOD_RES (1), (2), (36), (38): Xaa is C or S
  MOD_RES (16), (17), (18), (19), (20): Xaa is A or G
  MOD_RES (21), (22), (23), (24): Xaa is A or G or is absent

SEQ ID NO: 80788 - protein, 35 aa, Artificial Sequence
  GFR-binding peptide
  MOD_RES (1), (2), (35): Xaa is C or S
  MOD_RES (16), (17), (18), (19), (20): Xaa is A or G
  MOD_RES (21), (22), (23), (24): Xaa is A or G or is absent
XXAPVKTSAISMLYLXXXXXXXXXLKNYQMIVEEX

SEQ ID NO: 80789 - protein, 34 aa, Artificial Sequence
  GFR-binding peptide
  MOD_RES (2), (3): Xaa is C or S
PXXTPTKMSAISMLYLNDKQQIILKNYQGMVVDR

SEQ ID NO: 80790 - protein, 38 aa, Artificial Sequence; identical to SEQ ID NO: 7416
  GFR-binding peptide
  MOD_RES (5), (6): Xaa is C or S
  MOD_RES (20), (21), (22), (23), (24): Xaa is A or G
  MOD_RES (25), (26), (27), (28): Xaa is A or G or is absent

SEQ ID NO: 80791 - protein, 32 aa, Artificial Sequence
  GFR-binding peptide
  MOD_RES (14), (15), (16), (17), (18): Xaa is A or G
  MOD_RES (19), (20), (21), (22): Xaa is A or G or is absent
VPARLSAISILYLXXXXXXXXXLKNYQDMVVE

SEQ ID NO: 80792 - protein, 37 aa, Artificial Sequence
  GFR-binding peptide
  MOD_RES (4), (5), (37): Xaa is C or S
PASXXVPARLSAISILYLDAANNVVLKNYQDMVVEAX

SEQ ID NO: 80793 - protein, 37 aa, Artificial Sequence; identical to SEQ ID NO: 14715
  GFR-binding peptide
  MOD_RES (2), (3), (37): Xaa is C or S
  MOD_RES (17), (18), (19), (20), (21): Xaa is A or G
  MOD_RES (22), (23), (24), (25): Xaa is A or G or is absent

SEQ ID NO: 80794 - protein, 42 aa, Artificial Sequence; identical to SEQ ID NO: 9210
  GFR-binding peptide
  MOD_RES (3), (4), (39), (41): Xaa is C or S
  MOD_RES (18), (19), (20), (21), (22): Xaa is A or G
  MOD_RES (23), (24), (25), (26): Xaa is A or G or is absent

SEQ ID NO: 80795 - protein, 40 aa, Artificial Sequence; identical to SEQ ID NO: 7419
  GFR-binding peptide
  MOD_RES (3), (4), (37), (39): Xaa is C or S
  MOD_RES (18), (19), (20), (21), (22): Xaa is A or G
  MOD_RES (23), (24), (25), (26): Xaa is A or G or is absent

SEQ ID NO: 80796 - protein, 36 aa, Artificial Sequence; identical to SEQ ID NO: 28631
  GFR-binding peptide
  MOD_RES (5), (6): Xaa is C or S

SEQ ID NO: 80797 - protein, 36 aa, Artificial Sequence; identical to SEQ ID NO: 9213
  GFR-binding peptide
  MOD_RES (1), (35): Xaa is C or S
  MOD_RES (15), (16), (17), (18), (19): Xaa is A or G
  MOD_RES (20), (21), (22), (23): Xaa is A or G or is absent

SEQ ID NO: 80798 - protein, 37 aa, Artificial Sequence; identical to SEQ ID NO: 57607
  GFR-binding peptide
  MOD_RES (2), (3), (34), (36): Xaa is C or S

SEQ ID NO: 80799 - protein, 35 aa, Artificial Sequence; identical to SEQ ID NO: 7420
  GFR-binding peptide
  MOD_RES (1), (34): Xaa is C or S

SEQ ID NO: 80800 - protein, 38 aa, Artificial Sequence; identical to SEQ ID NO: 9215
  GFR-binding peptide
  MOD_RES (1), (2), (37): Xaa is C or S
  MOD_RES (16), (17), (18), (19), (20): Xaa is A or G
  MOD_RES (21), (22), (23), (24): Xaa is A or G or is absent

SEQ ID NO: 80801 - protein, 33 aa, Artificial Sequence; identical to SEQ ID NO: 7423
  GFR-binding peptide
  MOD_RES (1), (33): Xaa is C or S

SEQ ID NO: 80802 - protein, 34 aa, Artificial Sequence
  GFR-binding peptide
  MOD_RES (34), (34): Xaa is C or S
  MOD_RES (14), (15), (16), (17), (18): Xaa is A or G
  MOD_RES (19), (20), (21), (22): Xaa is A or G or is absent
VPARLSAISILYLXXXXXXXXXLKNYQDMVVEAX

SEQ ID NO: 80803 - protein, 43 aa, Artificial Sequence; identical to SEQ ID NO: 7425
  GFR-binding peptide
  MOD_RES (6), (7), (41), (43): Xaa is C or S
  MOD_RES (21), (22), (23), (24), (25): Xaa is A or G
  MOD_RES (26), (27), (28), (29): Xaa is A or G or is absent

SEQ ID NO: 80804 - protein, 36 aa, Artificial Sequence; identical to SEQ ID NO: 9218
  GFR-binding peptide
  MOD_RES (2), (3): Xaa is C or S
  MOD_RES (17), (18), (19), (20), (21): Xaa is A or G
  MOD_RES (22), (23), (24), (25): Xaa is A or G or is absent

SEQ ID NO: 80805 - protein, 39 aa, Artificial Sequence
  GFR-binding peptide
  MOD_RES (6), (7), (39): Xaa is C or S
GIPEPXXVPEKMSAISILYLDENKNVVLKNYQNMTVESX

SEQ ID NO: 80806 - protein, 34 aa, Artificial Sequence
  GFR-binding peptide
  MOD_RES (3), (4): Xaa is C or S
STXXAPVKTSAISMLYLDNGRVLLLKNYQMIVEE

SEQ ID NO: 80807 - protein, 38 aa, Artificial Sequence; identical to SEQ ID NO: 7427
  GFR-binding peptide
  MOD_RES (5), (6): Xaa is C or S
  MOD_RES (20), (21), (22), (23), (24): Xaa is A or G
  MOD_RES (25), (26), (27), (28): Xaa is A or G or is absent

SEQ ID NO: 80808 - protein, 39 aa, Artificial Sequence
  GFR-binding peptide
  MOD_RES (4), (5), (37), (39): Xaa is C or S
AGPXXTPTKMSAISMLYLNDKQQIILKNYQGMVVDRXGX

SEQ ID NO: 80809 - protein, 34 aa, Artificial Sequence; identical to SEQ ID NO: 7428
  GFR-binding peptide
  MOD_RES (1), (2), (34): Xaa is C or S

SEQ ID NO: 80810 - protein, 38 aa, Artificial Sequence; identical to SEQ ID NO: 9220
  GFR-binding peptide
  MOD_RES (6), (6): Xaa is C or S
  MOD_RES (20), (21), (22), (23), (24): Xaa is A or G
  MOD_RES (25), (26), (27), (28): Xaa is A or G or is absent

SEQ ID NO: 80811 - protein, 39 aa, Artificial Sequence; identical to SEQ ID NO: 7429
  GFR-binding peptide
  MOD_RES (6), (7): Xaa is C or S

SEQ ID NO: 80812 - protein, 33 aa, Artificial Sequence; identical to SEQ ID NO: 9221
  GFR-binding peptide
  MOD_RES (14), (15), (16), (17), (18): Xaa is A or G
  MOD_RES (19), (20), (21), (22): Xaa is A or G or is absent

SEQ ID NO: 80813 - protein, 35 aa, Artificial Sequence; identical to SEQ ID NO: 9222
  GFR-binding peptide
  MOD_RES (2), (3), (34): Xaa is C or S

SEQ ID NO: 80814 - protein, 36 aa, Artificial Sequence; identical to SEQ ID NO: 9223
  GFR-binding peptide
  MOD_RES (2), (3): Xaa is C or S
  MOD_RES (17), (18), (19), (20), (21): Xaa is A or G
  MOD_RES (22), (23), (24), (25): Xaa is A or G or is absent

SEQ ID NO: 80815 - protein, 42 aa, Artificial Sequence; identical to SEQ ID NO: 9225
  GFR-binding peptide
  MOD_RES (5), (6), (40), (42): Xaa is C or S
  MOD_RES (20), (21), (22), (23), (24): Xaa is A or G
  MOD_RES (25), (26), (27), (28): Xaa is A or G or is absent

SEQ ID NO: 80816 - protein, 37 aa, Artificial Sequence
  GFR-binding peptide
  MOD_RES (6), (7): Xaa is C or S
RVPSTXXAPVKTSAISMLYLDNGRVLLLKNYQMIVEE

SEQ ID NO: 80817 - protein, 38 aa, Artificial Sequence; identical to SEQ ID NO: 9228
  GFR-binding peptide
  MOD_RES (1), (2), (36), (38): Xaa is C or S
  MOD_RES (16), (17), (18), (19), (20): Xaa is A or G
  MOD_RES (21), (22), (23), (24): Xaa is A or G or is absent

SEQ ID NO: 80818 - protein, 35 aa, Artificial Sequence; identical to SEQ ID NO: 7434
  GFR-binding peptide
  MOD_RES (1), (34): Xaa is C or S
  MOD_RES (15), (16), (17), (18), (19): Xaa is A or G
  MOD_RES (20), (21), (22), (23): Xaa is A or G or is absent

SEQ ID NO: 80819 - protein, 36 aa, Artificial Sequence; identical to SEQ ID NO: 7436
  GFR-binding peptide
  MOD_RES (1), (2), (33), (35): Xaa is C or S

SEQ ID NO: 80820 - protein, 40 aa, Artificial Sequence; identical to SEQ ID NO: 57635
  GFR-binding peptide
  MOD_RES (4), (5), (39): Xaa is C or S
  MOD_RES (19), (20), (21), (22), (23): Xaa is A or G
  MOD_RES (24), (25), (26), (27): Xaa is A or G or is absent

SEQ ID NO: 80821 - protein, 36 aa, Artificial Sequence; identical to SEQ ID NO: 7437
  GFR-binding peptide
  MOD_RES (1), (2), (36): Xaa is C or S
  MOD_RES (16), (17), (18), (19), (20): Xaa is A or G
  MOD_RES (21), (22), (23), (24): Xaa is A or G or is absent

SEQ ID NO: 80822 - protein, 32 aa, Artificial Sequence; identical to SEQ ID NO: 9232
  GFR-binding peptide
  MOD_RES (1), (2): Xaa is C or S

SEQ ID NO: 80823 - protein, 35 aa, Artificial Sequence; identical to SEQ ID NO: 9233
  GFR-binding peptide
  MOD_RES (2), (3): Xaa is C or S
  MOD_RES (17), (18), (19), (20), (21): Xaa is A or G
  MOD_RES (22), (23), (24), (25): Xaa is A or G or is absent

SEQ ID NO: 80824 - protein, 37 aa, Artificial Sequence; identical to SEQ ID NO: 9235
  GFR-binding peptide
  MOD_RES (2), (3), (36): Xaa is C or S
  MOD_RES (17), (18), (19), (20), (21): Xaa is A or G
  MOD_RES (22), (23), (24), (25): Xaa is A or G or is absent

SEQ ID NO: 80825 - protein, 39 aa, Artificial Sequence
  GFR-binding peptide
  MOD_RES (4), (5), (39): Xaa is C or S
  MOD_RES (19), (20), (21), (22), (23): Xaa is A or G
  MOD_RES (24), (25), (26), (27): Xaa is A or G or is absent
SKAXXVPTKLSAISILYLXXXXXXXXXLKNYQGMAVSEX

SEQ ID NO: 80826 - protein, 37 aa, Artificial Sequence; identical to SEQ ID NO: 9236
  GFR-binding peptide
  MOD_RES (4), (5): Xaa is C or S

SEQ ID NO: 80827 - protein, 39 aa, Artificial Sequence
  GFR-binding peptide
  MOD_RES (5), (6), (38): Xaa is C or S
IPEPXXVPEKMSAISILYLDENKNVVLKNYQNMTVESXA

SEQ ID NO: 80828 - protein, 32 aa, Artificial Sequence; identical to SEQ ID NO: 7440
  GFR-binding peptide
  MOD_RES (32), (32): Xaa is C or S

SEQ ID NO: 80829 - protein, 33 aa, Artificial Sequence; identical to SEQ ID NO: 9237
  GFR-binding peptide
  MOD_RES (14), (15), (16), (17), (18): Xaa is A or G
  MOD_RES (19), (20), (21), (22): Xaa is A or G or is absent

SEQ ID NO: 80830 - protein, 37 aa, Artificial Sequence; identical to SEQ ID NO: 9238
  GFR-binding peptide
  MOD_RES (1), (2), (35), (37): Xaa is C or S
  MOD_RES (16), (17), (18), (19), (20): Xaa is A or G
  MOD_RES (21), (22), (23), (24): Xaa is A or G or is absent

SEQ ID NO: 80831 - protein, 34 aa, Artificial Sequence; identical to SEQ ID NO: 57638
  GFR-binding peptide
  MOD_RES (1), (33): Xaa is C or S

SEQ ID NO: 80832 - protein, 38 aa, Artificial Sequence; identical to SEQ ID NO: 7441
  GFR-binding peptide
  MOD_RES (5), (6), (38): Xaa is C or S

SEQ ID NO: 80833 - protein, 37 aa, Artificial Sequence; identical to SEQ ID NO: 7442
  GFR-binding peptide
  MOD_RES (6), (7): Xaa is C or S

SEQ ID NO: 80834 - protein, 39 aa, Artificial Sequence; identical to SEQ ID NO: 9242
  GFR-binding peptide
  MOD_RES (2), (3), (37), (39): Xaa is C or S
  MOD_RES (17), (18), (19), (20), (21): Xaa is A or G
  MOD_RES (22), (23), (24), (25): Xaa is A or G or is absent

SEQ ID NO: 80835 - protein, 38 aa, Artificial Sequence; identical to SEQ ID NO: 7445
  GFR-binding peptide
  MOD_RES (2), (3), (37): Xaa is C or S
  MOD_RES (17), (18), (19), (20), (21): Xaa is A or G
  MOD_RES (22), (23), (24), (25): Xaa is A or G or is absent

SEQ ID NO: 80836 - protein, 37 aa, Artificial Sequence; identical to SEQ ID NO: 57644
  GFR-binding peptide
  MOD_RES (4), (5), (36): Xaa is C or S

SEQ ID NO: 80837 - protein, 37 aa, Artificial Sequence; identical to SEQ ID NO: 7446
  GFR-binding peptide
  MOD_RES (3), (4), (37): Xaa is C or S
  MOD_RES (18), (19), (20), (21), (22): Xaa is A or G
  MOD_RES (23), (24), (25), (26): Xaa is A or G or is absent

SEQ ID NO: 80838 - protein, 39 aa, Artificial Sequence
  GFR-binding peptide
  MOD_RES (3), (4), (36), (38): Xaa is C or S
GPXXTPTKMSAISMLYLNDKQQIILKNYQGMVVDRXGXS

SEQ ID NO: 80839 - protein, 44 aa, Artificial Sequence
  GFR-binding peptide
  MOD_RES (6), (7), (41), (43): Xaa is C or S
  MOD_RES (21), (22), (23), (24), (25): Xaa is A or G
  MOD_RES (26), (27), (28), (29): Xaa is A or G or is absent
AAPASXXVPARLSAISILYLXXXXXXXXXLKNYQDMVVEAXGXR

SEQ ID NO: 80840 - protein, 37 aa, Artificial Sequence; identical to SEQ ID NO: 9244
  GFR-binding peptide
  MOD_RES (3), (4), (37): Xaa is C or S
  MOD_RES (18), (19), (20), (21), (22): Xaa is A or G
  MOD_RES (23), (24), (25), (26): Xaa is A or G or is absent

SEQ ID NO: 80841 - protein, 34 aa, Artificial Sequence; identical to SEQ ID NO: 16520
  GFR-binding peptide
  MOD_RES (1), (33): Xaa is C or S

SEQ ID NO: 80842 - protein, 41 aa, Artificial Sequence; identical to SEQ ID NO: 9245
  GFR-binding peptide
  MOD_RES (3), (4), (39), (41): Xaa is C or S
  MOD_RES (18), (19), (20), (21), (22): Xaa is A or G
  MOD_RES (23), (24), (25), (26): Xaa is A or G or is absent

SEQ ID NO: 80843 - protein, 34 aa, Artificial Sequence
  GFR-binding peptide
  MOD_RES (1), (1): Xaa is C or S
  MOD_RES (15), (16), (17), (18), (19): Xaa is A or G
  MOD_RES (20), (21), (22), (23): Xaa is A or G or is absent
XVPTKLSAISILYLXXXXXXXXXLKNYQGMAVSE

SEQ ID NO: 80844 - protein, 37 aa, Artificial Sequence; identical to SEQ ID NO: 69815
  GFR-binding peptide
  MOD_RES (4), (5): Xaa is C or S
  MOD_RES (19), (20), (21), (22), (23): Xaa is A or G
  MOD_RES (24), (25), (26), (27): Xaa is A or G or is absent

SEQ ID NO: 80845 - protein, 36 aa, Artificial Sequence
  GFR-binding peptide
  MOD_RES (34), (36): Xaa is C or S
  MOD_RES (14), (15), (16), (17), (18): Xaa is A or G
  MOD_RES (19), (20), (21), (22): Xaa is A or G or is absent
VPARLSAISILYLXXXXXXXXXLKNYQDMVVEAXGX

SEQ ID NO: 80846 - protein, 38 aa, Artificial Sequence
  GFR-binding peptide
  MOD_RES (2), (3), (37): Xaa is C or S
  MOD_RES (17), (18), (19), (20), (21): Xaa is A or G
  MOD_RES (22), (23), (24), (25): Xaa is A or G or is absent
PXXVPEKMSAISILYLXXXXXXXXXLKNYQNMTVESXA

SEQ ID NO: 80847 - protein, 38 aa, Artificial Sequence
  GFR-binding peptide
  MOD_RES (1), (35), (37): Xaa is C or S
  MOD_RES (15), (16), (17), (18), (19): Xaa is A or G
  MOD_RES (20), (21), (22), (23): Xaa is A or G or is absent
XVPTKLSAISILYLXXXXXXXXXLKNYQGMAVSEXGXR

SEQ ID NO: 80848 - protein, 34 aa, Artificial Sequence; identical to SEQ ID NO: 57652
  GFR-binding peptide
  MOD_RES (1), (2), (33): Xaa is C or S

SEQ ID NO: 80849 - protein, 39 aa, Artificial Sequence; identical to SEQ ID NO: 9252
  GFR-binding peptide
  MOD_RES (6), (7): Xaa is C or S
  MOD_RES (21), (22), (23), (24), (25): Xaa is A or G
  MOD_RES (26), (27), (28), (29): Xaa is A or G or is absent

SEQ ID NO: 80850 - protein, 33 aa, Artificial Sequence; identical to SEQ ID NO: 57653
  GFR-binding peptide
  MOD_RES (1), (2): Xaa is C or S

SEQ ID NO: 80851 - protein, 36 aa, Artificial Sequence; identical to SEQ ID NO: 9253
  GFR-binding peptide
  MOD_RES (1), (34), (36): Xaa is C or S
  MOD_RES (15), (16), (17), (18), (19): Xaa is A or G
  MOD_RES (20), (21), (22), (23): Xaa is A or G or is absent

SEQ ID NO: 80852 - protein, 39 aa, Artificial Sequence; identical to SEQ ID NO: 16533
  GFR-binding peptide
  MOD_RES (2), (3), (37), (39): Xaa is C or S
  MOD_RES (17), (18), (19), (20), (21): Xaa is A or G
  MOD_RES (22), (23), (24), (25): Xaa is A or G or is absent

SEQ ID NO: 80853 - protein, 38 aa, Artificial Sequence; identical to SEQ ID NO: 9255
  GFR-binding peptide
  MOD_RES (5), (6), (37): Xaa is C or S

SEQ ID NO: 80854 - protein, 36 aa, Artificial Sequence; identical to SEQ ID NO: 57655
  GFR-binding peptide
  MOD_RES (4), (5): Xaa is C or S

SEQ ID NO: 80855 - protein, 35 aa, Artificial Sequence; identical to SEQ ID NO: 66409
  GFR-binding peptide
  MOD_RES (4), (5): Xaa is C or S

SEQ ID NO: 80856 - protein, 41 aa, Artificial Sequence; identical to SEQ ID NO: 30628
  GFR-binding peptide
  MOD_RES (6), (7), (41): Xaa is C or S
  MOD_RES (21), (22), (23), (24), (25): Xaa is A or G
  MOD_RES (26), (27), (28), (29): Xaa is A or G or is absent

SEQ ID NO: 80857 - protein, 36 aa, Artificial Sequence; identical to SEQ ID NO: 7455
  GFR-binding peptide
  MOD_RES (1), (2), (34), (36): Xaa is C or S

SEQ ID NO: 80858 - protein, 34 aa, Artificial Sequence; identical to SEQ ID NO: 7456
  GFR-binding peptide
  MOD_RES (1), (2): Xaa is C or S
  MOD_RES (16), (17), (18), (19), (20): Xaa is A or G
  MOD_RES (21), (22), (23), (24): Xaa is A or G or is absent

SEQ ID NO: 80859 - protein, 37 aa, Artificial Sequence; identical to SEQ ID NO: 7457
  GFR-binding peptide
  MOD_RES (1), (34), (36): Xaa is C or S
  MOD_RES (15), (16), (17), (18), (19): Xaa is A or G
  MOD_RES (20), (21), (22), (23): Xaa is A or G or is absent

SEQ ID NO: 80860 - protein, 36 aa, Artificial Sequence; identical to SEQ ID NO: 9257
  GFR-binding peptide
  MOD_RES (1), (33), (35): Xaa is C or S

SEQ ID NO: 80861 - protein, 40 aa, Artificial Sequence; identical to SEQ ID NO: 28684
  GFR-binding peptide
  MOD_RES (6), (7), (39): Xaa is C or S

SEQ ID NO: 80862 - protein, 39 aa, Artificial Sequence; identical to SEQ ID NO: 57665
  GFR-binding peptide
  MOD_RES (5), (6): Xaa is C or S
  MOD_RES (20), (21), (22), (23), (24): Xaa is A or G
  MOD_RES (25), (26), (27), (28): Xaa is A or G or is absent

SEQ ID NO: 80863 - protein, 38 aa, Artificial Sequence
  GFR-binding peptide
  MOD_RES (6), (7): Xaa is C or S
KASKAXXVPTKLSAISILYLDKGVVTYLKNYQGMAVSE

SEQ ID NO: 80864 - protein, 37 aa, Artificial Sequence; identical to SEQ ID NO: 9258
  GFR-binding peptide
  MOD_RES (4), (5), (36): Xaa is C or S

SEQ ID NO: 80865 - protein, 34 aa, Artificial Sequence; identical to SEQ ID NO: 9261
  GFR-binding peptide
  MOD_RES (3), (4): Xaa is C or S

SEQ ID NO: 80866 - protein, 41 aa, Artificial Sequence; identical to SEQ ID NO: 7462
  GFR-binding peptide
  MOD_RES (6), (7), (39), (41): Xaa is C or S

SEQ ID NO: 80867 - protein, 34 aa, Artificial Sequence; identical to SEQ ID NO: 9262
  GFR-binding peptide
  MOD_RES (34), (34): Xaa is C or S
  MOD_RES (14), (15), (16), (17), (18): Xaa is A or G
  MOD_RES (19), (20), (21), (22): Xaa is A or G or is absent

SEQ ID NO: 80868 - protein, 41 aa, Artificial Sequence; identical to SEQ ID NO: 9263
  GFR-binding peptide
  MOD_RES (6), (7), (41): Xaa is C or S
  MOD_RES (21), (22), (23), (24), (25): Xaa is A or G
  MOD_RES (26), (27), (28), (29): Xaa is A or G or is absent

SEQ ID NO: 80869 - protein, 40 aa, Artificial Sequence; identical to SEQ ID NO: 9264
  GFR-binding peptide
  MOD_RES (4), (5), (37), (39): Xaa is C or S

SEQ ID NO: 80870 - protein, 37 aa, Artificial Sequence; identical to SEQ ID NO: 9265
  GFR-binding peptide
  MOD_RES (4), (5): Xaa is C or S
  MOD_RES (19), (20), (21), (22), (23): Xaa is A or G
  MOD_RES (24), (25), (26), (27): Xaa is A or G or is absent

SEQ ID NO: 80871 - protein, 35 aa, Artificial Sequence; identical to SEQ ID NO: 7465
  GFR-binding peptide
  MOD_RES (1), (2), (34): Xaa is C or S

SEQ ID NO: 80872 - protein, 39 aa, Artificial Sequence; identical to SEQ ID NO: 7467
  GFR-binding peptide
  MOD_RES (4), (5), (39): Xaa is C or S
  MOD_RES (19), (20), (21), (22), (23): Xaa is A or G
  MOD_RES (24), (25), (26), (27): Xaa is A or G or is absent

SEQ ID NO: 80873 - protein, 40 aa, Artificial Sequence; identical to SEQ ID NO: 7468
  GFR-binding peptide
  MOD_RES (5), (6), (40): Xaa is C or S
  MOD_RES (20), (21), (22), (23), (24): Xaa is A or G
  MOD_RES (25), (26), (27), (28): Xaa is A or G or is absent

SEQ ID NO: 80874 - protein, 32 aa, Artificial Sequence; identical to SEQ ID NO: 30644
  GFR-binding peptide
  MOD_RES (14), (15), (16), (17), (18): Xaa is A or G
  MOD_RES (19), (20), (21), (22): Xaa is A or G or is absent

SEQ ID NO: 80875 - protein, 41 aa, Artificial Sequence
  GFR-binding peptide
  MOD_RES (6), (7), (41): Xaa is C or S
  MOD_RES (21), (22), (23), (24), (25): Xaa is A or G
  MOD_RES (26), (27), (28), (29): Xaa is A or G or is absent
HVPKPXXAPTKLSAISVLYLXXXXXXXXXLKNYQNMVVRSX

SEQ ID NO: 80876 - protein, 35 aa, Artificial Sequence; identical to SEQ ID NO: 16546
  GFR-binding peptide
  MOD_RES (2), (3), (35): Xaa is C or S

SEQ ID NO: 80877 - protein, 34 aa, Artificial Sequence; identical to SEQ ID NO: 7475
  GFR-binding peptide
  MOD_RES (2), (3), (34): Xaa is C or S

SEQ ID NO: 80878 - protein, 34 aa, Artificial Sequence
  GFR-binding peptide
  MOD_RES (1), (2): Xaa is C or S
  MOD_RES (16), (17), (18), (19), (20): Xaa is A or G
  MOD_RES (21), (22), (23), (24): Xaa is A or G or is absent
XXVPEKMSAISILYLXXXXXXXXXLKNYQNMTVE

SEQ ID NO: 80879 - protein, 33 aa, Artificial Sequence; identical to SEQ ID NO: 57670
  GFR-binding peptide
  MOD_RES (1), (33): Xaa is C or S

SEQ ID NO: 80880 - protein, 36 aa, Artificial Sequence; identical to SEQ ID NO: 28701
  GFR-binding peptide
  MOD_RES (3), (4): Xaa is C or S
  MOD_RES (18), (19), (20), (21), (22): Xaa is A or G
  MOD_RES (23), (24), (25), (26): Xaa is A or G or is absent

SEQ ID NO: 80881 - protein, 39 aa, Artificial Sequence
  GFR-binding peptide
  MOD_RES (6), (7): Xaa is C or S
  MOD_RES (21), (22), (23), (24), (25): Xaa is A or G
  MOD_RES (26), (27), (28), (29): Xaa is A or G or is absent
GSAGPXXTPTKMSAISMLYLXXXXXXXXXLKNYQGMVVD

SEQ ID NO: 80882 - protein, 35 aa, Artificial Sequence; identical to SEQ ID NO: 7478
  GFR-binding peptide
  MOD_RES (2), (3): Xaa is C or S
  MOD_RES (17), (18), (19), (20), (21): Xaa is A or G
  MOD_RES (22), (23), (24), (25): Xaa is A or G or is absent

SEQ ID NO: 80883 - protein, 35 aa, Artificial Sequence
  GFR-binding peptide
  MOD_RES (1), (35): Xaa is C or S
  MOD_RES (15), (16), (17), (18), (19): Xaa is A or G
  MOD_RES (20), (21), (22), (23): Xaa is A or G or is absent
XTPTKMSAISMLYLXXXXXXXXXLKNYQGMVVDRX

SEQ ID NO: 80884 - protein, 36 aa, Artificial Sequence; identical to SEQ ID NO: 9273
  GFR-binding peptide
  MOD_RES (2), (3): Xaa is C or S
  MOD_RES (17), (18), (19), (20), (21): Xaa is A or G
  MOD_RES (22), (23), (24), (25): Xaa is A or G or is absent

SEQ ID NO: 80885 - protein, 33 aa, Artificial Sequence; identical to SEQ ID NO: 30652
  GFR-binding peptide
  MOD_RES (1), (1): Xaa is C or S
  MOD_RES (15), (16), (17), (18), (19): Xaa is A or G
  MOD_RES (20), (21), (22), (23): Xaa is A or G or is absent

SEQ ID NO: 80886 - protein, 41 aa, Artificial Sequence; identical to SEQ ID NO: 9276
  GFR-binding peptide
  MOD_RES (6), (7), (38), (40): Xaa is C or S

SEQ ID NO: 80887 - protein, 38 aa, Artificial Sequence; identical to SEQ ID NO: 7480
  GFR-binding peptide
  MOD_RES (1), (2), (36), (38): Xaa is C or S
  MOD_RES (16), (17), (18), (19), (20): Xaa is A or G
  MOD_RES (21), (22), (23), (24): Xaa is A or G or is absent

SEQ ID NO: 80888 - protein, 37 aa, Artificial Sequence
  GFR-binding peptide
  MOD_RES (2), (3), (37): Xaa is C or S
  MOD_RES (17), (18), (19), (20), (21): Xaa is A or G
  MOD_RES (22), (23), (24), (25): Xaa is A or G or is absent
PXXTPTKMSAISMLYLXXXXXXXXXLKNYQGMVVDRX

SEQ ID NO: 80889 - protein, 39 aa, Artificial Sequence; identical to SEQ ID NO: 57678
  GFR-binding peptide
  MOD_RES (3), (4), (36), (38): Xaa is C or S

SEQ ID NO: 80890 - protein, 39 aa, Artificial Sequence; identical to SEQ ID NO: 9279
  GFR-binding peptide
  MOD_RES (4), (5), (36), (38): Xaa is C or S

SEQ ID NO: 80891 - protein, 36 aa, Artificial Sequence; identical to SEQ ID NO: 9282
  GFR-binding peptide
  MOD_RES (1), (2), (34), (36): Xaa is C or S

SEQ ID NO: 80892 - protein, 38 aa, Artificial Sequence; identical to SEQ ID NO: 7481
  GFR-binding peptide
  MOD_RES (3), (4), (37): Xaa is C or S
  MOD_RES (18), (19), (20), (21), (22): Xaa is A or G
  MOD_RES (23), (24), (25), (26): Xaa is A or G or is absent

SEQ ID NO: 80893 - protein, 41 aa, Artificial Sequence; identical to SEQ ID NO: 7482
  GFR-binding peptide
  MOD_RES (6), (7), (38), (40): Xaa is C or S

SEQ ID NO: 80894 - protein, 40 aa, Artificial Sequence; identical to SEQ ID NO: 7484
  GFR-binding peptide
  MOD_RES (6), (7), (38), (40): Xaa is C or S

SEQ ID NO: 80895 - protein, 34 aa, Artificial Sequence; identical to SEQ ID NO: 7485
  GFR-binding peptide
  MOD_RES (1), (33): Xaa is C or S

SEQ ID NO: 80896 - protein, 41 aa, Artificial Sequence
  GFR-binding peptide
  MOD_RES (6), (7), (41): Xaa is C or S
  MOD_RES (21), (22), (23), (24), (25): Xaa is A or G
  MOD_RES (26), (27), (28), (29): Xaa is A or G or is absent
GIPEPXXVPEKMSAISILYLXXXXXXXXXLKNYQNMTVESX

SEQ ID NO: 80897 - protein, 41 aa, Artificial Sequence; identical to SEQ ID NO: 7488
  GFR-binding peptide
  MOD_RES (6), (7), (40): Xaa is C or S
  MOD_RES (21), (22), (23), (24), (25): Xaa is A or G
  MOD_RES (26), (27), (28), (29): Xaa is A or G or is absent

SEQ ID NO: 80898 - protein, 37 aa, Artificial Sequence; identical to SEQ ID NO: 7489
  GFR-binding peptide
  MOD_RES (6), (7): Xaa is C or S

SEQ ID NO: 80899 - protein, 42 aa, Artificial Sequence; identical to SEQ ID NO: 66436
  GFR-binding peptide
  MOD_RES (4), (5), (39), (41): Xaa is C or S
  MOD_RES (19), (20), (21), (22), (23): Xaa is A or G
  MOD_RES (24), (25), (26), (27): Xaa is A or G or is absent

SEQ ID NO: 80900 - protein, 36 aa, Artificial Sequence; identical to SEQ ID NO: 7490
  GFR-binding peptide
  MOD_RES (1), (36): Xaa is C or S
  MOD_RES (15), (16), (17), (18), (19): Xaa is A or G
  MOD_RES (20), (21), (22), (23): Xaa is A or G or is absent

SEQ ID NO: 80901 - protein, 41 aa, Artificial Sequence; identical to SEQ ID NO: 7491
  GFR-binding peptide
  MOD_RES (4), (5), (38), (40): Xaa is C or S

SEQ ID NO: 80902 - protein, 37 aa, Artificial Sequence; identical to SEQ ID NO: 57686
  GFR-binding peptide
  MOD_RES (6), (7): Xaa is C or S

SEQ ID NO: 80903 - protein, 42 aa, Artificial Sequence; identical to SEQ ID NO: 7492
  GFR-binding peptide
  MOD_RES (6), (7), (41): Xaa is C or S
  MOD_RES (21), (22), (23), (24), (25): Xaa is A or G
  MOD_RES (26), (27), (28), (29): Xaa is A or G or is absent

SEQ ID NO: 80904 - protein, 36 aa, Artificial Sequence; identical to SEQ ID NO: 7494
  GFR-binding peptide
  MOD_RES (1), (2), (33), (35): Xaa is C or S

SEQ ID NO: 80905 - protein, 36 aa, Artificial Sequence; identical to SEQ ID NO: 7496
  GFR-binding peptide
  MOD_RES (5), (6): Xaa is C or S

SEQ ID NO: 80906 - protein, 33 aa, Artificial Sequence; identical to SEQ ID NO: 9284
  GFR-binding peptide
  MOD_RES (32), (32): Xaa is C or S

SEQ ID NO: 80907 - protein, 37 aa, Artificial Sequence; identical to SEQ ID NO: 9285
  GFR-binding peptide
  MOD_RES (4), (5): Xaa is C or S
  MOD_RES (19), (20), (21), (22), (23): Xaa is A or G
  MOD_RES (24), (25), (26), (27): Xaa is A or G or is absent

SEQ ID NO: 80908 - protein, 40 aa, Artificial Sequence; identical to SEQ ID NO: 14802
  GFR-binding peptide
  MOD_RES (2), (3), (37), (39): Xaa is C or S
  MOD_RES (17), (18), (19), (20), (21): Xaa is A or G
  MOD_RES (22), (23), (24), (25): Xaa is A or G or is absent

SEQ ID NO: 80909 - protein, 33 aa, Artificial Sequence; identical to SEQ ID NO: 7497
  GFR-binding peptide
  MOD_RES (1), (2): Xaa is C or S

SEQ ID NO: 80910 - protein, 38 aa, Artificial Sequence
  GFR-binding peptide
  MOD_RES (3), (4), (35), (37): Xaa is C or S
STXXAPVKTSAISMLYLDNGRVLLLKNYQMIVEEXGXL

SEQ ID NO: 80911 - protein, 40 aa, Artificial Sequence; identical to SEQ ID NO: 9286
  GFR-binding peptide
  MOD_RES (4), (5), (40): Xaa is C or S
  MOD_RES (19), (20), (21), (22), (23): Xaa is A or G
  MOD_RES (24), (25), (26), (27): Xaa is A or G or is absent

SEQ ID NO: 80912 - protein, 36 aa, Artificial Sequence; identical to SEQ ID NO: 7498
  GFR-binding peptide
  MOD_RES (3), (4): Xaa is C or S
  MOD_RES (18), (19), (20), (21), (22): Xaa is A or G
  MOD_RES (23), (24), (25), (26): Xaa is A or G or is absent

SEQ ID NO: 80913 - protein, 40 aa, Artificial Sequence; identical to SEQ ID NO: 9287
  GFR-binding peptide
  MOD_RES (5), (6), (38), (40): Xaa is C or S

SEQ ID NO: 80914 - protein, 33 aa, Artificial Sequence
  GFR-binding peptide
  MOD_RES (32), (32): Xaa is C or S
VPARLSAISILYLDAANNVVLKNYQDMVVEAXG

SEQ ID NO: 80915 - protein, 41 aa, Artificial Sequence; identical to SEQ ID NO: 28727
  GFR-binding peptide
  MOD_RES (4), (5), (39), (41): Xaa is C or S
  MOD_RES (19), (20), (21), (22), (23): Xaa is A or G
  MOD_RES (24), (25), (26), (27): Xaa is A or G or is absent

SEQ ID NO: 80916 - protein, 34 aa, Artificial Sequence; identical to SEQ ID NO: 16578
  GFR-binding peptide
  MOD_RES (34), (34): Xaa is C or S
  MOD_RES (14), (15), (16), (17), (18): Xaa is A or G
  MOD_RES (19), (20), (21), (22): Xaa is A or G or is absent

SEQ ID NO: 80917 - protein, 37 aa, Artificial Sequence; identical to SEQ ID NO: 14808
  GFR-binding peptide
  MOD_RES (1), (2), (36): Xaa is C or S
  MOD_RES (16), (17), (18), (19), (20): Xaa is A or G
  MOD_RES (21), (22), (23), (24): Xaa is A or G or is absent

SEQ ID NO: 80918 - protein, 37 aa, Artificial Sequence; identical to SEQ ID NO: 7501
  GFR-binding peptide
  MOD_RES (1), (2), (34), (36): Xaa is C or S

SEQ ID NO: 80919 - protein, 40 aa, Artificial Sequence; identical to SEQ ID NO: 57704
  GFR-binding peptide
  MOD_RES (2), (3), (37), (39): Xaa is C or S
  MOD_RES (17), (18), (19), (20), (21): Xaa is A or G
  MOD_RES (22), (23), (24), (25): Xaa is A or G or is absent

SEQ ID NO: 80920 - protein, 38 aa, Artificial Sequence; identical to SEQ ID NO: 7502
  GFR-binding peptide
  MOD_RES (2), (3), (36), (38): Xaa is C or S
  MOD_RES (17), (18), (19), (20), (21): Xaa is A or G
  MOD_RES (22), (23), (24), (25): Xaa is A or G or is absent

SEQ ID NO: 80921 - protein, 42 aa, Artificial Sequence; identical to SEQ ID NO: 9291
  GFR-binding peptide
  MOD_RES (4), (5), (39), (41): Xaa is C or S
  MOD_RES (19), (20), (21), (22), (23): Xaa is A or G
  MOD_RES (24), (25), (26), (27): Xaa is A or G or is absent

SEQ ID NO: 80922 - protein, 39 aa, Artificial Sequence; identical to SEQ ID NO: 9292
  GFR-binding peptide
  MOD_RES (6), (7): Xaa is C or S
  MOD_RES (21), (22), (23), (24), (25): Xaa is A or G
  MOD_RES (26), (27), (28), (29): Xaa is A or G or is absent

SEQ ID NO: 80923 - protein, 44 aa, Artificial Sequence; identical to SEQ ID NO: 9294
  GFR-binding peptide
  MOD_RES (6), (7), (41), (43): Xaa is C or S
  MOD_RES (21), (22), (23), (24), (25): Xaa is A or G
  MOD_RES (26), (27), (28), (29): Xaa is A or G or is absent

SEQ ID NO: 80924 - protein, 36 aa, Artificial Sequence; identical to SEQ ID NO: 9296
  GFR-binding peptide
  MOD_RES (35), (35): Xaa is C or S
  MOD_RES (14), (15), (16), (17), (18): Xaa is A or G
  MOD_RES (19), (20), (21), (22): Xaa is A or G or is absent

SEQ ID NO: 80925 - protein, 36 aa, Artificial Sequence; identical to SEQ ID NO: 7507
  GFR-binding peptide
  MOD_RES (5), (6): Xaa is C or S

SEQ ID NO: 80926 - protein, 31 aa, Artificial Sequence; identical to SEQ ID NO: 30685
  GFR-binding peptide
  MOD_RES (1), (1): Xaa is C or S

SEQ ID NO: 80927 - protein, 39 aa, Artificial Sequence; identical to SEQ ID NO: 9298
  GFR-binding peptide
  MOD_RES (1), (2), (37), (39): Xaa is C or S
  MOD_RES (16), (17), (18), (19), (20): Xaa is A or G
  MOD_RES (21), (22), (23), (24): Xaa is A or G or is absent

SEQ ID NO: 80928 - protein, 40 aa, Artificial Sequence; identical to SEQ ID NO: 30687
  GFR-binding peptide
  MOD_RES (5), (6), (40): Xaa is C or S
  MOD_RES (20), (21), (22), (23), (24): Xaa is A or G
  MOD_RES (25), (26), (27), (28): Xaa is A or G or is absent

SEQ ID NO: 80929 - protein, 42 aa, Artificial Sequence; identical to SEQ ID NO: 9302
  GFR-binding peptide
  MOD_RES (6), (7), (40), (42): Xaa is C or S
  MOD_RES (21), (22), (23), (24), (25): Xaa is A or G
  MOD_RES (26), (27), (28), (29): Xaa is A or G or is absent

SEQ ID NO: 80930 - protein, 34 aa, Artificial Sequence; identical to SEQ ID NO: 69860
  GFR-binding peptide
  MOD_RES (1), (33): Xaa is C or S

SEQ ID NO: 80931 - protein, 37 aa, Artificial Sequence
  GFR-binding peptide
  MOD_RES (2), (3), (37): Xaa is C or S
  MOD_RES (17), (18), (19), (20), (21): Xaa is A or G
  MOD_RES (22), (23), (24), (25): Xaa is A or G or is absent
SXXVPARLSAISILYLXXXXXXXXXLKNYQDMVVEAX

SEQ ID NO: 80932 - protein, 40 aa, Artificial Sequence; identical to SEQ ID NO: 30691
  GFR-binding peptide
  MOD_RES (5), (6), (38), (40): Xaa is C or S

SEQ ID NO: 80933 - protein, 40 aa, Artificial Sequence
  GFR-binding peptide
  MOD_RES (6), (7): Xaa is C or S
  MOD_RES (21), (22), (23), (24), (25): Xaa is A or G
  MOD_RES (26), (27), (28), (29): Xaa is A or G or is absent
KASKAXXVPTKLSAISILYLXXXXXXXXXLKNYQGMAVSE

SEQ ID NO: 80934 - protein, 33 aa, Artificial Sequence
  GFR-binding peptide
  MOD_RES (2), (3): Xaa is C or S
AXXVPTKLSAISILYLDKGVVTYLKNYQGMAVS

SEQ ID NO: 80935 - protein, 43 aa, Artificial Sequence; identical to SEQ ID NO: 9303
  GFR-binding peptide
  MOD_RES (6), (7), (40), (42): Xaa is C or S
  MOD_RES (21), (22), (23), (24), (25): Xaa is A or G
  MOD_RES (26), (27), (28), (29): Xaa is A or G or is absent

SEQ ID NO: 80936 - protein, 33 aa, Artificial Sequence; identical to SEQ ID NO: 9304
  GFR-binding peptide
  MOD_RES (31), (33): Xaa is C or S

SEQ ID NO: 80937 - protein, 38 aa, Artificial Sequence
  GFR-binding peptide
  MOD_RES (2), (3), (37): Xaa is C or S
  MOD_RES (17), (18), (19), (20), (21): Xaa is A or G
  MOD_RES (22), (23), (24), (25): Xaa is A or G or is absent
SXXVPARLSAISILYLXXXXXXXXXLKNYQDMVVEAXG

SEQ ID NO: 80938 - protein, 38 aa, Artificial Sequence; identical to SEQ ID NO: 7514
  GFR-binding peptide
  MOD_RES (3), (4), (37): Xaa is C or S
  MOD_RES (18), (19), (20), (21), (22): Xaa is A or G
  MOD_RES (23), (24), (25), (26): Xaa is A or G or is absent

SEQ ID NO: 80939 - protein, 40 aa, Artificial Sequence; identical to SEQ ID NO: 9305
  GFR-binding peptide
  MOD_RES (6), (40): Xaa is C or S
  MOD_RES (20), (21), (22), (23), (24): Xaa is A or G
  MOD_RES (25), (26), (27), (28): Xaa is A or G or is absent

SEQ ID NO: 80940 - protein, 39 aa, Artificial Sequence; identical to SEQ ID NO: 30696
  GFR-binding peptide
  MOD_RES (3), (4), (36), (38): Xaa is C or S

SEQ ID NO: 80941 - protein, 37 aa, Artificial Sequence
  GFR-binding peptide
  MOD_RES (1), (2), (34), (36): Xaa is C or S
XXVPARLSAISILYLDAANNVVLKNYQDMVVEAXGXR

SEQ ID NO: 80942 - protein, 44 aa, Artificial Sequence
  GFR-binding peptide
  MOD_RES (6), (7), (41), (43): Xaa is C or S
  MOD_RES (21), (22), (23), (24), (25): Xaa is A or G
  MOD_RES (26), (27), (28), (29): Xaa is A or G or is absent
KASKAXXVPTKLSAISILYLXXXXXXXXXLKNYQGMAVSEXGXR

SEQ ID NO: 80943 - protein, 35 aa, Artificial Sequence; identical to SEQ ID NO: 68202
  GFR-binding peptide
  MOD_RES (3), (4): Xaa is C or S

SEQ ID NO: 80944 - protein, 41 aa, Artificial Sequence
  GFR-binding peptide
  MOD_RES (3), (4), (38), (40): Xaa is C or S
  MOD_RES (18), (19), (20), (21), (22): Xaa is A or G
  MOD_RES (23), (24), (25), (26): Xaa is A or G or is absent
ASXXVPARLSAISILYLXXXXXXXXXLKNYQDMVVEAXGXR

SEQ ID NO: 80945 - protein, 41 aa, Artificial Sequence
  GFR-binding peptide
  MOD_RES (6), (7), (39), (41): Xaa is C or S
HVPKPXXAPTKLSAISVLYLDDSSNVILKNYQNMVVRSXGX

SEQ ID NO: 80946 - protein, 40 aa, Artificial Sequence
  GFR-binding peptide
  MOD_RES (5), (6), (39): Xaa is C or S
  MOD_RES (20), (21), (22), (23), (24): Xaa is A or G
  MOD_RES (25), (26), (27), (28): Xaa is A or G or is absent
VPSTXXAPVKTSAISMLYLXXXXXXXXXLKNYQMIVEEXG

SEQ ID NO: 80947 - protein, 35 aa, Artificial Sequence
  GFR-binding peptide
  MOD_RES (1), (2), (34): Xaa is C or S
XXVPEKMSAISILYLDENKNVVLKNYQNMTVESXA

SEQ ID NO: 80948 - protein, 39 aa, Artificial Sequence; identical to SEQ ID NO: 9309
  GFR-binding peptide
  MOD_RES (5), (37), (39): Xaa is C or S

SEQ ID NO: 80949 - protein, 38 aa, Artificial Sequence; identical to SEQ ID NO: 30702
  GFR-binding peptide
  MOD_RES (3), (4), (36), (38): Xaa is C or S

SEQ ID NO: 80950 - protein, 41 aa, Artificial Sequence
  GFR-binding peptide
  MOD_RES (6), (7), (39), (41): Xaa is C or S
GSAGPXXTPTKMSAISMLYLNDKQQIILKNYQGMVVDRXGX

SEQ ID NO: 80951 - protein, 33 aa, Artificial Sequence
  GFR-binding peptide
  MOD_RES (32), (32): Xaa is C or S
VPTKLSAISILYLDKGVVTYLKNYQGMAVSEXG

SEQ ID NO: 80952 - protein, 33 aa, Artificial Sequence; identical to SEQ ID NO: 9313
  GFR-binding peptide
  MOD_RES (32), (32): Xaa is C or S

SEQ ID NO: 80953 - protein, 38 aa, Artificial Sequence; identical to SEQ ID NO: 7521
  GFR-binding peptide
  MOD_RES (3), (4), (38): Xaa is C or S
  MOD_RES (18), (19), (20), (21), (22): Xaa is A or G
  MOD_RES (23), (24), (25), (26): Xaa is A or G or is absent

SEQ ID NO: 80954 - protein, 39 aa, Artificial Sequence; identical to SEQ ID NO: 7522
  GFR-binding peptide
  MOD_RES (6), (7): Xaa is C or S
  MOD_RES (21), (22), (23), (24), (25): Xaa is A or G
  MOD_RES (26), (27), (28), (29): Xaa is A or G or is absent

SEQ ID NO: 80955 - protein, 36 aa, Artificial Sequence; identical to SEQ ID NO: 9316
  GFR-binding peptide
  MOD_RES (3), (4): Xaa is C or S
  MOD_RES (18), (19), (20), (21), (22): Xaa is A or G
  MOD_RES (23), (24), (25), (26): Xaa is A or G or is absent

SEQ ID NO: 80956 - protein, 36 aa, Artificial Sequence; identical to SEQ ID NO: 16617
  GFR-binding peptide
  MOD_RES (1), (2), (34), (36): Xaa is C or S

SEQ ID NO: 80957 - protein, 40 aa, Artificial Sequence; identical to SEQ ID NO: 7524
  GFR-binding peptide
  MOD_RES (4), (5), (39): Xaa is C or S
  MOD_RES (19), (20), (21), (22), (23): Xaa is A or G
  MOD_RES (24), (25), (26), (27): Xaa is A or G or is absent

SEQ ID NO: 80958 - protein, 41 aa, Artificial Sequence
  GFR-binding peptide
  MOD_RES (6), (7), (40): Xaa is C or S
  MOD_RES (21), (22), (23), (24), (25): Xaa is A or G
  MOD_RES (26), (27), (28), (29): Xaa is A or G or is absent
RVPSTXXAPVKTSAISMLYLXXXXXXXXXLKNYQMIVEEXG

SEQ ID NO: 80959 - protein, 37 aa, Artificial Sequence; identical to SEQ ID NO: 9317
  GFR-binding peptide
  MOD_RES (3), (4), (37): Xaa is C or S
  MOD_RES (18), (19), (20), (21), (22): Xaa is A or G
  MOD_RES (23), (24), (25), (26): Xaa is A or G or is absent

SEQ ID NO: 80960 - protein, 33 aa, Artificial Sequence; identical to SEQ ID NO: 7526
  GFR-binding peptide
  MOD_RES (33), (33): Xaa is C or S

SEQ ID NO: 80961 - protein, 39 aa, Artificial Sequence; identical to SEQ ID NO: 7527
  GFR-binding peptide
  MOD_RES (5), (6): Xaa is C or S
  MOD_RES (20), (21), (22), (23), (24): Xaa is A or G
  MOD_RES (25), (26), (27), (28): Xaa is A or G or is absent

SEQ ID NO: 80962 - protein, 40 aa, Artificial Sequence; identical to SEQ ID NO: 7529
  GFR-binding peptide
  MOD_RES (6), (7), (40): Xaa is C or S

SEQ ID NO: 80963 - protein, 37 aa, Artificial Sequence; identical to SEQ ID NO: 7530
  GFR-binding peptide
  MOD_RES (3), (4): Xaa is C or S
  MOD_RES (18), (19), (20), (21), (22): Xaa is A or G
  MOD_RES (23), (24), (25), (26): Xaa is A or G or is absent

SEQ ID NO: 80964 - protein, 33 aa, Artificial Sequence; identical to SEQ ID NO: 9322
  GFR-binding peptide
  MOD_RES (1), (32): Xaa is C or S

SEQ ID NO: 80965 - protein, 37 aa, Artificial Sequence; identical to SEQ ID NO: 28767
  GFR-binding peptide
  MOD_RES (6), (7): Xaa is C or S

SEQ ID NO: 80966 - protein, 40 aa, Artificial Sequence; identical to SEQ ID NO: 9323
  GFR-binding peptide
  MOD_RES (5), (6), (40): Xaa is C or S
  MOD_RES (20), (21), (22), (23), (24): Xaa is A or G
  MOD_RES (25), (26), (27), (28): Xaa is A or G or is absent

SEQ ID NO: 80967 - protein, 40 aa, Artificial Sequence; identical to SEQ ID NO: 57735
  GFR-binding peptide
  MOD_RES (6), (7): Xaa is C or S
  MOD_RES (21), (22), (23), (24), (25): Xaa is A or G
  MOD_RES (26), (27), (28), (29): Xaa is A or G or is absent

SEQ ID NO: 80968 - protein, 35 aa, Artificial Sequence; identical to SEQ ID NO: 9324
  GFR-binding peptide
  MOD_RES (1), (33), (35): Xaa is C or S

SEQ ID NO: 80969 - protein, 39 aa, Artificial Sequence; identical to SEQ ID NO: 9325
  GFR-binding peptide
  MOD_RES (5), (6): Xaa is C or S
  MOD_RES (20), (21), (22), (23), (24): Xaa is A or G
  MOD_RES (25), (26), (27), (28): Xaa is A or G or is absent

SEQ ID NO: 80970 - protein, 31 aa, Artificial Sequence; identical to SEQ ID NO: 28771
  GFR-binding peptide

SEQ ID NO: 80971 - protein, 37 aa, Artificial Sequence; identical to SEQ ID NO: 9327
  GFR-binding peptide
  MOD_RES (1), (2), (35), (37): Xaa is C or S
  MOD_RES (16), (17), (18), (19), (20): Xaa is A or G
  MOD_RES (21), (22), (23), (24): Xaa is A or G or is absent

SEQ ID NO: 80972 - protein, 36 aa, Artificial Sequence; identical to SEQ ID NO: 7535
  GFR-binding peptide
  MOD_RES (34), (36): Xaa is C or S
  MOD_RES (14), (15), (16), (17), (18): Xaa is A or G
  MOD_RES (19), (20), (21), (22): Xaa is A or G or is absent

SEQ ID NO: 80973 - protein, 37 aa, Artificial Sequence; identical to SEQ ID NO: 9328
  GFR-binding peptide
  MOD_RES (3), (4), (36): Xaa is C or S

SEQ ID NO: 80974 - protein, 38 aa, Artificial Sequence; identical to SEQ ID NO: 7536
  GFR-binding peptide
  MOD_RES (3), (4): Xaa is C or S
  MOD_RES (18), (19), (20), (21), (22): Xaa is A or G
  MOD_RES (23), (24), (25), (26): Xaa is A or G or is absent

SEQ ID NO: 80975 - protein, 35 aa, Artificial Sequence; identical to SEQ ID NO: 57744
  GFR-binding peptide
  MOD_RES (2), (3): Xaa is C or S
  MOD_RES (17), (18), (19), (20), (21): Xaa is A or G
  MOD_RES (22), (23), (24), (25): Xaa is A or G or is absent

SEQ ID NO: 80976 - protein, 36 aa, Artificial Sequence; identical to SEQ ID NO: 9330
  GFR-binding peptide
  MOD_RES (34), (36): Xaa is C or S
  MOD_RES (14), (15), (16), (17), (18): Xaa is A or G
  MOD_RES (19), (20), (21), (22): Xaa is A or G or is absent

SEQ ID NO: 80977 - protein, 31 aa, Artificial Sequence
  GFR-binding peptide
  MOD_RES (1), (1): Xaa is C or S
XVPARLSAISILYLDAANNVVLKNYQDMVVE

SEQ ID NO: 80978 - protein, 37 aa, Artificial Sequence; identical to SEQ ID NO: 7537
  GFR-binding peptide
  MOD_RES (1), (34), (36): Xaa is C or S
  MOD_RES (15), (16), (17), (18), (19): Xaa is A or G
  MOD_RES (20), (21), (22), (23): Xaa is A or G or is absent

SEQ ID NO: 80979 - protein, 33 aa, Artificial Sequence; identical to SEQ ID NO: 9331
  GFR-binding peptide
  MOD_RES (14), (15), (16), (17), (18): Xaa is A or G
  MOD_RES (19), (20), (21), (22): Xaa is A or G or is absent

SEQ ID NO: 80980 - protein, 35 aa, Artificial Sequence; identical to SEQ ID NO: 9332
  GFR-binding peptide
  MOD_RES (3), (4), (35): Xaa is C or S

SEQ ID NO: 80981 - protein, 35 aa, Artificial Sequence; identical to SEQ ID NO: 28777
  GFR-binding peptide
  MOD_RES (2), (3): Xaa is C or S
  MOD_RES (17), (18), (19), (20), (21): Xaa is A or G
  MOD_RES (22), (23), (24), (25): Xaa is A or G or is absent

SEQ ID NO: 80982 - protein, 39 aa, Artificial Sequence; identical to SEQ ID NO: 7538
  GFR-binding peptide
  MOD_RES (5), (6), (37), (39): Xaa is C or S

SEQ ID NO: 80983 - protein, 30 aa, Artificial Sequence
  GFR-binding peptide
VPARLSAISILYLDAANNVVLKNYQDMVVE

SEQ ID NO: 80984 - protein, 43 aa, Artificial Sequence; identical to SEQ ID NO: 9334
  GFR-binding peptide
  MOD_RES (6), (7), (41), (43): Xaa is C or S
  MOD_RES (21), (22), (23), (24), (25): Xaa is A or G
  MOD_RES (26), (27), (28), (29): Xaa is A or G or is absent

SEQ ID NO: 80985 - protein, 35 aa, Artificial Sequence; identical to SEQ ID NO: 9335
  GFR-binding peptide
  MOD_RES (2), (3), (34): Xaa is C or S

SEQ ID NO: 80986 - protein, 37 aa, Artificial Sequence; identical to SEQ ID NO: 7540
  GFR-binding peptide
  MOD_RES (2), (3), (37): Xaa is C or S
  MOD_RES (17), (18), (19), (20), (21): Xaa is A or G
  MOD_RES (22), (23), (24), (25): Xaa is A or G or is absent

SEQ ID NO: 80987 - protein, 30 aa, Artificial Sequence; identical to SEQ ID NO: 57751
  GFR-binding peptide

SEQ ID NO: 80988 - protein, 36 aa, Artificial Sequence; identical to SEQ ID NO: 9336
  GFR-binding peptide
  MOD_RES (3), (4), (36): Xaa is C or S

SEQ ID NO: 80989 - protein, 37 aa, Artificial Sequence; identical to SEQ ID NO: 16639
  GFR-binding peptide
  MOD_RES (6), (7): Xaa is C or S

SEQ ID NO: 80990 - protein, 39 aa, Artificial Sequence; identical to SEQ ID NO: 68230
  GFR-binding peptide
  MOD_RES (6), (7): Xaa is C or S
  MOD_RES (21), (22), (23), (24), (25): Xaa is A or G
  MOD_RES (26), (27), (28), (29): Xaa is A or G or is absent

SEQ ID NO: 80991 - protein, 36 aa, Artificial Sequence; identical to SEQ ID NO: 9337
  GFR-binding peptide
  MOD_RES (2), (3): Xaa is C or S
  MOD_RES (17), (18), (19), (20), (21): Xaa is A or G
  MOD_RES (22), (23), (24), (25): Xaa is A or G or is absent

SEQ ID NO: 80992 - protein, 38 aa, Artificial Sequence; identical to SEQ ID NO: 7543
  GFR-binding peptide
  MOD_RES (2), (3), (37): Xaa is C or S
  MOD_RES (17), (18), (19), (20), (21): Xaa is A or G
  MOD_RES (22), (23), (24), (25): Xaa is A or G or is absent

SEQ ID NO: 80993 - protein, 37 aa, Artificial Sequence; identical to SEQ ID NO: 7544
  GFR-binding peptide
  MOD_RES (3), (4): Xaa is C or S
  MOD_RES (18), (19), (20), (21), (22): Xaa is A or G
  MOD_RES (23), (24), (25), (26): Xaa is A or G or is absent

SEQ ID NO: 80994 - protein, 34 aa, Artificial Sequence; identical to SEQ ID NO: 57755
  GFR-binding peptide
  MOD_RES (32), (34): Xaa is C or S

SEQ ID NO: 80995 - protein, 40 aa, Artificial Sequence; identical to SEQ ID NO: 7545
  GFR-binding peptide
  MOD_RES (3), (4), (38), (40): Xaa is C or S
  MOD_RES (18), (19), (20), (21), (22): Xaa is A or G
  MOD_RES (23), (24), (25), (26): Xaa is A or G or is absent

SEQ ID NO: 80996 - protein, 37 aa, Artificial Sequence; identical to SEQ ID NO: 28785
  GFR-binding peptide
  MOD_RES (5), (6): Xaa is C or S

SEQ ID NO: 80997 - protein, 38 aa, Artificial Sequence; identical to SEQ ID NO: 7546
  GFR-binding peptide
  MOD_RES (1), (35), (37): Xaa is C or S
  MOD_RES (15), (16), (17), (18), (19): Xaa is A or G
  MOD_RES (20), (21), (22), (23): Xaa is A or G or is absent

SEQ ID NO: 80998 - protein, 36 aa, Artificial Sequence; identical to SEQ ID NO: 7548
  GFR-binding peptide
  MOD_RES (1), (2), (35): Xaa is C or S
  MOD_RES (16), (17), (18), (19), (20): Xaa is A or G
  MOD_RES (21), (22), (23), (24): Xaa is A or G or is absent

SEQ ID NO: 80999 - protein, 37 aa, Artificial Sequence; identical to SEQ ID NO: 7549
  GFR-binding peptide
  MOD_RES (6), (7): Xaa is C or S

SEQ ID NO: 81000 - protein, 35 aa, Artificial Sequence; identical to SEQ ID NO: 7551
  GFR-binding peptide
  MOD_RES (32), (34): Xaa is C or S

SEQ ID NO: 81001 - protein, 40 aa, Artificial Sequence; identical to SEQ ID NO: 57764
  GFR-binding peptide
  MOD_RES (5), (6), (40): Xaa is C or S
  MOD_RES (20), (21), (22), (23), (24): Xaa is A or G
  MOD_RES (25), (26), (27), (28): Xaa is A or G or is absent

SEQ ID NO: 81002 - protein, 41 aa, Artificial Sequence; identical to SEQ ID NO: 7553
  GFR-binding peptide
  MOD_RES (5), (6), (40): Xaa is C or S
  MOD_RES (20), (21), (22), (23), (24): Xaa is A or G
  MOD_RES (25), (26), (27), (28): Xaa is A or G or is absent

SEQ ID NO: 81003 - protein, 39 aa, Artificial Sequence
  GFR-binding peptide
  MOD_RES (2), (3), (36), (38): Xaa is C or S
  MOD_RES (17), (18), (19), (20), (21): Xaa is A or G
  MOD_RES (22), (23), (24), (25): Xaa is A or G or is absent
TXXAPVKTSAISMLYLXXXXXXXXXLKNYQMIVEEXGXL

SEQ ID NO: 81004 - protein, 31 aa, Artificial Sequence; identical to SEQ ID NO: 9343
  GFR-binding peptide

SEQ ID NO: 81005 - protein, 39 aa, Artificial Sequence; identical to SEQ ID NO: 57769
  GFR-binding peptide
  MOD_RES (2), (3), (36), (38): Xaa is C or S
  MOD_RES (17), (18), (19), (20), (21): Xaa is A or G
  MOD_RES (22), (23), (24), (25): Xaa is A or G or is absent

SEQ ID NO: 81006 - protein, 37 aa, Artificial Sequence; identical to SEQ ID NO: 7556
  GFR-binding peptide
  MOD_RES (4), (5): Xaa is C or S
  MOD_RES (19), (20), (21), (22), (23): Xaa is A or G
  MOD_RES (24), (25), (26), (27): Xaa is A or G or is absent

SEQ ID NO: 81007 - protein, 41 aa, Artificial Sequence; identical to SEQ ID NO: 30733
  GFR-binding peptide
  MOD_RES (6), (7), (41): Xaa is C or S
  MOD_RES (21), (22), (23), (24), (25): Xaa is A or G
  MOD_RES (26), (27), (28), (29): Xaa is A or G or is absent

SEQ ID NO: 81008 - protein, 38 aa, Artificial Sequence; identical to SEQ ID NO: 7558
  GFR-binding peptide
  MOD_RES (4), (5), (37): Xaa is C or S

SEQ ID NO: 81009 - protein, 34 aa, Artificial Sequence; identical to SEQ ID NO: 7559
  GFR-binding peptide
  MOD_RES (1), (2): Xaa is C or S
  MOD_RES (16), (17), (18), (19), (20): Xaa is A or G
  MOD_RES (21), (22), (23), (24): Xaa is A or G or is absent

SEQ ID NO: 81010 - protein, 39 aa, Artificial Sequence; identical to SEQ ID NO: 9345
  GFR-binding peptide
  MOD_RES (1), (2), (36), (38): Xaa is C or S
  MOD_RES (16), (17), (18), (19), (20): Xaa is A or G
  MOD_RES (21), (22), (23), (24): Xaa is A or G or is absent

SEQ ID NO: 81011 - protein, 35 aa, Artificial Sequence; identical to SEQ ID NO: 30735
  GFR-binding peptide
  MOD_RES (32), (34): Xaa is C or S

SEQ ID NO: 81012 - protein, 37 aa, Artificial Sequence; identical to SEQ ID NO: 9347
  GFR-binding peptide
  MOD_RES (34), (36): Xaa is C or S
  MOD_RES (14), (15), (16), (17), (18): Xaa is A or G
  MOD_RES (19), (20), (21), (22): Xaa is A or G or is absent

SEQ ID NO: 81013 - protein, 36 aa, Artificial Sequence; identical to SEQ ID NO: 7564
  GFR-binding peptide
  MOD_RES (1), (2), (36): Xaa is C or S
  MOD_RES (16), (17), (18), (19), (20): Xaa is A or G
  MOD_RES (21), (22), (23), (24): Xaa is A or G or is absent

SEQ ID NO: 81014 - protein, 39 aa, Artificial Sequence
  GFR-binding peptide
  MOD_RES (3), (4), (36), (38): Xaa is C or S
ASXXVPARLSAISILYLDAANNVVLKNYQDMVVEAXGXR

SEQ ID NO: 81015 - protein, 31 aa, Artificial Sequence; identical to SEQ ID NO: 7565
  GFR-binding peptide
  MOD_RES (31), (31): Xaa is C or S

SEQ ID NO: 81016 - protein, 38 aa, Artificial Sequence
  GFR-binding peptide
  MOD_RES (2), (3), (37): Xaa is C or S
  MOD_RES (17), (18), (19), (20), (21): Xaa is A or G
  MOD_RES (22), (23), (24), (25): Xaa is A or G or is absent
AXXVPTKLSAISILYLXXXXXXXXXLKNYQGMAVSEXG

SEQ ID NO: 81017 - protein, 35 aa, Artificial Sequence
  GFR-binding peptide
  MOD_RES (1), (2): Xaa is C or S
  MOD_RES (16), (17), (18), (19), (20): Xaa is A or G
  MOD_RES (21), (22), (23), (24): Xaa is A or G or is absent
XXTPTKMSAISMLYLXXXXXXXXXLKNYQGMVVDR

SEQ ID NO: 81018 - protein, 39 aa, Artificial Sequence; identical to SEQ ID NO: 7567
  GFR-binding peptide
  MOD_RES (3), (4), (37), (39): Xaa is C or S
  MOD_RES (18), (19), (20), (21), (22): Xaa is A or G
  MOD_RES (23), (24), (25), (26): Xaa is A or G or is absent

SEQ ID NO: 81019 - protein, 35 aa, Artificial Sequence; identical to SEQ ID NO: 9350
  GFR-binding peptide
  MOD_RES (1), (35): Xaa is C or S
  MOD_RES (15), (16), (17), (18), (19): Xaa is A or G
  MOD_RES (20), (21), (22), (23): Xaa is A or G or is absent

SEQ ID NO: 81020 - protein, 34 aa, Artificial Sequence; identical to SEQ ID NO: 7569
  GFR-binding peptide
  MOD_RES (1), (34): Xaa is C or S

SEQ ID NO: 81021 - protein, 39 aa, Artificial Sequence; identical to SEQ ID NO: 9352
  GFR-binding peptide
  MOD_RES (5), (6), (38): Xaa is C or S

SEQ ID NO: 81022 - protein, 38 aa, Artificial Sequence
  GFR-binding peptide
  MOD_RES (4), (5): Xaa is C or S
  MOD_RES (19), (20), (21), (22), (23): Xaa is A or G
  MOD_RES (24), (25), (26), (27): Xaa is A or G or is absent
SKAXXVPTKLSAISILYLXXXXXXXXXLKNYQGMAVSE

SEQ ID NO: 81023 - protein, 40 aa, Artificial Sequence
  GFR-binding peptide
  MOD_RES (5), (6), (40): Xaa is C or S
  MOD_RES (20), (21), (22), (23), (24): Xaa is A or G
  MOD_RES (25), (26), (27), (28): Xaa is A or G or is absent
IPEPXXVPEKMSAISILYLXXXXXXXXXLKNYQNMTVESX

SEQ ID NO: 81024 - protein, 36 aa, Artificial Sequence; identical to SEQ ID NO: 9354
  GFR-binding peptide
  MOD_RES (3), (4): Xaa is C or S
  MOD_RES (18), (19), (20), (21), (22): Xaa is A or G
  MOD_RES (23), (24), (25), (26): Xaa is A or G or is absent

SEQ ID NO: 81025 - protein, 36 aa, Artificial Sequence; identical to SEQ ID NO: 7572
  GFR-binding peptide
  MOD_RES (34), (36): Xaa is C or S
  MOD_RES (14), (15), (16), (17), (18): Xaa is A or G
  MOD_RES (19), (20), (21), (22): Xaa is A or G or is absent

SEQ ID NO: 81026 - protein, 38 aa, Artificial Sequence; identical to SEQ ID NO: 71578
  GFR-binding peptide
  MOD_RES (2), (3), (35), (37): Xaa is C or S

SEQ ID NO: 81027 - protein, 38 aa, Artificial Sequence; identical to SEQ ID NO: 57790
  GFR-binding peptide
  MOD_RES (2), (3), (36), (38): Xaa is C or S
  MOD_RES (17), (18), (19), (20), (21): Xaa is A or G
  MOD_RES (22), (23), (24), (25): Xaa is A or G or is absent

SEQ ID NO: 81028 - protein, 39 aa, Artificial Sequence
  GFR-binding peptide
  MOD_RES (4), (5), (39): Xaa is C or S
  MOD_RES (19), (20), (21), (22), (23): Xaa is A or G
  MOD_RES (24), (25), (26), (27): Xaa is A or G or is absent
PASXXVPARLSAISILYLXXXXXXXXXLKNYQDMVVEAX

SEQ ID NO: 81029 - protein, 40 aa, Artificial Sequence; identical to SEQ ID NO: 14884
  GFR-binding peptide
  MOD_RES (5), (6), (40): Xaa is C or S
  MOD_RES (20), (21), (22), (23), (24): Xaa is A or G
  MOD_RES (25), (26), (27), (28): Xaa is A or G or is absent

SEQ ID NO: 81030 - protein, 35 aa, Artificial Sequence; identical to SEQ ID NO: 7574
  GFR-binding peptide
  MOD_RES (34), (34): Xaa is C or S
  MOD_RES (14), (15), (16), (17), (18): Xaa is A or G
  MOD_RES (19), (20), (21), (22): Xaa is A or G or is absent

SEQ ID NO: 81031 - protein, 35 aa, Artificial Sequence; identical to SEQ ID NO: 68248
  GFR-binding peptide
  MOD_RES (2), (3), (35): Xaa is C or S

SEQ ID NO: 81032 - protein, 35 aa, Artificial Sequence; identical to SEQ ID NO: 9359
  GFR-binding peptide
  MOD_RES (4), (5): Xaa is C or S

SEQ ID NO: 81033 - protein, 33 aa, Artificial Sequence; identical to SEQ ID NO: 66512
  GFR-binding peptide
  MOD_RES (1), (1): Xaa is C or S
  MOD_RES (15), (16), (17), (18), (19): Xaa is A or G
  MOD_RES (20), (21), (22), (23): Xaa is A or G or is absent

SEQ ID NO: 81034 - protein, 43 aa, Artificial Sequence; identical to SEQ ID NO: 68250
  GFR-binding peptide
  MOD_RES (5), (6), (40), (42): Xaa is C or S
  MOD_RES (20), (21), (22), (23), (24): Xaa is A or G
  MOD_RES (25), (26), (27), (28): Xaa is A or G or is absent

SEQ ID NO: 81035 - protein, 38 aa, Artificial Sequence; identical to SEQ ID NO: 9361
  GFR-binding peptide
  MOD_RES (3), (4), (38): Xaa is C or S
  MOD_RES (18), (19), (20), (21), (22): Xaa is A or G
  MOD_RES (23), (24), (25), (26): Xaa is A or G or is absent

SEQ ID NO: 81036 - protein, 33 aa, Artificial Sequence; identical to SEQ ID NO: 7577
  GFR-binding peptide
  MOD_RES (1), (33): Xaa is C or S

SEQ ID NO: 81037 - protein, 38 aa, Artificial Sequence; identical to SEQ ID NO: 7578
  GFR-binding peptide
  MOD_RES (5), (6): Xaa is C or S
  MOD_RES (20), (21), (22), (23), (24): Xaa is A or G
  MOD_RES (25), (26), (27), (28): Xaa is A or G or is absent

SEQ ID NO: 81038 - protein, 31 aa, Artificial Sequence; identical to SEQ ID NO: 7579
  GFR-binding peptide

SEQ ID NO: 81039 - protein, 38 aa, Artificial Sequence; identical to SEQ ID NO: 9364
  GFR-binding peptide
  MOD_RES (5), (6), (37): Xaa is C or S

SEQ ID NO: 81040 - protein, 40 aa, Artificial Sequence; identical to SEQ ID NO: 7580
  GFR-binding peptide
  MOD_RES (4), (5), (39): Xaa is C or S
  MOD_RES (19), (20), (21), (22), (23): Xaa is A or G
  MOD_RES (24), (25), (26), (27): Xaa is A or G or is absent

SEQ ID NO: 81041 - protein, 37 aa, Artificial Sequence; identical to SEQ ID NO: 30756
  GFR-binding peptide
  MOD_RES (2), (3), (37): Xaa is C or S
  MOD_RES (17), (18), (19), (20), (21): Xaa is A or G
  MOD_RES (22), (23), (24), (25): Xaa is A or G or is absent

SEQ ID NO: 81042 - protein, 37 aa, Artificial Sequence; identical to SEQ ID NO: 14888
  GFR-binding peptide
  MOD_RES (4), (5): Xaa is C or S
  MOD_RES (19), (20), (21), (22), (23): Xaa is A or G
  MOD_RES (24), (25), (26), (27): Xaa is A or G or is absent

SEQ ID NO: 81043 - protein, 36 aa, Artificial Sequence
  GFR-binding peptide
  MOD_RES (3), (4): Xaa is C or S
  MOD_RES (18), (19), (20), (21), (22): Xaa is A or G
  MOD_RES (23), (24), (25), (26): Xaa is A or G or is absent
ASXXVPARLSAISILYLXXXXXXXXXLKNYQDMVVE

SEQ ID NO: 81044 - protein, 40 aa, Artificial Sequence; identical to SEQ ID NO: 9366
  GFR-binding peptide
  MOD_RES (2), (3), (37), (39): Xaa is C or S
  MOD_RES (17), (18), (19), (20), (21): Xaa is A or G
  MOD_RES (22), (23), (24), (25): Xaa is A or G or is absent

SEQ ID NO: 81045 - protein, 31 aa, Artificial Sequence
  GFR-binding peptide
VPEKMSAISILYLDENKNVVLKNYQNMTVES

SEQ ID NO: 81046 - protein, 36 aa, Artificial Sequence
  GFR-binding peptide
  MOD_RES (5), (6): Xaa is C or S
SAGPXXTPTKMSAISMLYLNDKQQIILKNYQGMVVD

SEQ ID NO: 81047 - protein, 40 aa, Artificial Sequence; identical to SEQ ID NO: 30762
  GFR-binding peptide
  MOD_RES (3), (4), (38), (40): Xaa is C or S
  MOD_RES (18), (19), (20), (21), (22): Xaa is A or G
  MOD_RES (23), (24), (25), (26): Xaa is A or G or is absent

SEQ ID NO: 81048 - protein, 39 aa, Artificial Sequence
  GFR-binding peptide
  MOD_RES (5), (6), (39): Xaa is C or S
  MOD_RES (20), (21), (22), (23), (24): Xaa is A or G
  MOD_RES (25), (26), (27), (28): Xaa is A or G or is absent
VPSTXXAPVKTSAISMLYLXXXXXXXXXLKNYQMIVEEX

SEQ ID NO: 81049 - protein, 35 aa, Artificial Sequence
  GFR-binding peptide
  MOD_RES (1), (35): Xaa is C or S
  MOD_RES (15), (16), (17), (18), (19): Xaa is A or G
  MOD_RES (20), (21), (22), (23): Xaa is A or G or is absent
XVPTKLSAISILYLXXXXXXXXXLKNYQGMAVSEX

SEQ ID NO: 81050 - protein, 38 aa, Artificial Sequence; identical to SEQ ID NO: 69926
  GFR-binding peptide
  MOD_RES (3), (4), (38): Xaa is C or S
  MOD_RES (18), (19), (20), (21), (22): Xaa is A or G
  MOD_RES (23), (24), (25), (26): Xaa is A or G or is absent

SEQ ID NO: 81051 - protein, 39 aa, Artificial Sequence; identical to SEQ ID NO: 7585
  GFR-binding peptide
  MOD_RES (6), (7): Xaa is C or S
  MOD_RES (21), (22), (23), (24), (25): Xaa is A or G
  MOD_RES (26), (27), (28), (29): Xaa is A or G or is absent

SEQ ID NO: 81052 - protein, 41 aa, Artificial Sequence
  GFR-binding peptide
  MOD_RES (6), (7), (41): Xaa is C or S
  MOD_RES (21), (22), (23), (24), (25): Xaa is A or G
  MOD_RES (26), (27), (28), (29): Xaa is A or G or is absent
KASKAXXVPTKLSAISILYLXXXXXXXXXLKNYQGMAVSEX

SEQ ID NO: 81053 - protein, 43 aa, Artificial Sequence
  GFR-binding peptide
  MOD_RES (5), (6), (40), (42): Xaa is C or S
  MOD_RES (20), (21), (22), (23), (24): Xaa is A or G
  MOD_RES (25), (26), (27), (28): Xaa is A or G or is absent
SAGPXXTPTKMSAISMLYLXXXXXXXXXLKNYQGMVVDRXGXS

SEQ ID NO: 81054 - protein, 35 aa, Artificial Sequence; identical to SEQ ID NO: 57809
  GFR-binding peptide
  MOD_RES (33), (35): Xaa is C or S
  MOD_RES (14), (15), (16), (17), (18): Xaa is A or G
  MOD_RES (19), (20), (21), (22): Xaa is A or G or is absent

SEQ ID NO: 81055 - protein, 38 aa, Artificial Sequence; identical to SEQ ID NO: 71599
  GFR-binding peptide
  MOD_RES (6), (7): Xaa is C or S

SEQ ID NO: 81056 - protein, 39 aa, Artificial Sequence; identical to SEQ ID NO: 7588
  GFR-binding peptide
  MOD_RES (2), (3), (36), (38): Xaa is C or S
  MOD_RES (17), (18), (19), (20), (21): Xaa is A or G
  MOD_RES (22), (23), (24), (25): Xaa is A or G or is absent

SEQ ID NO: 81057 - protein, 41 aa, Artificial Sequence; identical to SEQ ID NO: 9371
  GFR-binding peptide
  MOD_RES (6), (7), (39), (41): Xaa is C or S

SEQ ID NO: 81058 - protein, 35 aa, Artificial Sequence; identical to SEQ ID NO: 7592
  GFR-binding peptide
  MOD_RES (1), (2), (35): Xaa is C or S
  MOD_RES (16), (17), (18), (19), (20): Xaa is A or G
  MOD_RES (21), (22), (23), (24): Xaa is A or G or is absent

SEQ ID NO: 81059 - protein, 39 aa, Artificial Sequence; identical to SEQ ID NO: 9373
  GFR-binding peptide
  MOD_RES (4), (5), (36), (38): Xaa is C or S

SEQ ID NO: 81060 - protein, 39 aa, Artificial Sequence
  GFR-binding peptide
  MOD_RES (6), (7), (39): Xaa is C or S
AAPASXXVPARLSAISILYLDAANNVVLKNYQDMVVEAX

SEQ ID NO: 81061 - protein, 40 aa, Artificial Sequence; identical to SEQ ID NO: 69934
  GFR-binding peptide
  MOD_RES (5), (6), (40): Xaa is C or S
  MOD_RES (20), (21), (22), (23), (24): Xaa is A or G
  MOD_RES (25), (26), (27), (28): Xaa is A or G or is absent

SEQ ID NO: 81062 - protein, 37 aa, Artificial Sequence; identical to SEQ ID NO: 57813
  GFR-binding peptide
  MOD_RES (4), (5): Xaa is C or S
  MOD_RES (19), (20), (21), (22), (23): Xaa is A or G
  MOD_RES (24), (25), (26), (27): Xaa is A or G or is absent

SEQ ID NO: 81063 - protein, 37 aa, Artificial Sequence
  GFR-binding peptide
  MOD_RES (2), (3), (36): Xaa is C or S
  MOD_RES (17), (18), (19), (20), (21): Xaa is A or G
  MOD_RES (22), (23), (24), (25): Xaa is A or G or is absent
TXXAPVKTSAISMLYLXXXXXXXXXLKNYQMIVEEXG

SEQ ID NO: 81064 - protein, 34 aa, Artificial Sequence; identical to SEQ ID NO: 14899
  GFR-binding peptide
  MOD_RES (32), (34): Xaa is C or S

SEQ ID NO: 81065 - protein, 37 aa, Artificial Sequence; identical to SEQ ID NO: 9376
  GFR-binding peptide
  MOD_RES (5), (6): Xaa is C or S

SEQ ID NO: 81066 - protein, 39 aa, Artificial Sequence
  GFR-binding peptide
  MOD_RES (3), (4), (38): Xaa is C or S
  MOD_RES (18), (19), (20), (21), (22): Xaa is A or G
  MOD_RES (23), (24), (25), (26): Xaa is A or G or is absent
ASXXVPARLSAISILYLXXXXXXXXXLKNYQDMVVEAXG

SEQ ID NO: 81067 - protein, 37 aa, Artificial Sequence; identical to SEQ ID NO: 9377
  GFR-binding peptide
  MOD_RES (1), (34), (36): Xaa is C or S
  MOD_RES (15), (16), (17), (18), (19): Xaa is A or G
  MOD_RES (20), (21), (22), (23): Xaa is A or G or is absent

SEQ ID NO: 81068 - protein, 38 aa, Artificial Sequence; identical to SEQ ID NO: 7599
  GFR-binding peptide
  MOD_RES (2), (3), (35), (37): Xaa is C or S

SEQ ID NO: 81069 - protein, 37 aa, Artificial Sequence; identical to SEQ ID NO: 9380
  GFR-binding peptide
  MOD_RES (3), (4), (37): Xaa is C or S
  MOD_RES (18), (19), (20), (21), (22): Xaa is A or G
  MOD_RES (23), (24), (25), (26): Xaa is A or G or is absent

SEQ ID NO: 81070 - protein, 42 aa, Artificial Sequence; identical to SEQ ID NO: 9382
  GFR-binding peptide
  MOD_RES (5), (6), (39), (41): Xaa is C or S
  MOD_RES (20), (21), (22), (23), (24): Xaa is A or G
  MOD_RES (25), (26), (27), (28): Xaa is A or G or is absent

SEQ ID NO: 81071 - protein, 32 aa, Artificial Sequence; identical to SEQ ID NO: 9383
  GFR-binding peptide
  MOD_RES (14), (15), (16), (17), (18): Xaa is A or G
  MOD_RES (19), (20), (21), (22): Xaa is A or G or is absent

SEQ ID NO: 81072 - protein, 38 aa, Artificial Sequence; identical to SEQ ID NO: 7600
  GFR-binding peptide
  MOD_RES (2), (3), (36), (38): Xaa is C or S
  MOD_RES (17), (18), (19), (20), (21): Xaa is A or G
  MOD_RES (22), (23), (24), (25): Xaa is A or G or is absent

SEQ ID NO: 81073 - protein, 39 aa, Artificial Sequence; identical to SEQ ID NO: 7601
  GFR-binding peptide
  MOD_RES (6), (7), (39): Xaa is C or S

SEQ ID NO: 81074 - protein, 35 aa, Artificial Sequence; identical to SEQ ID NO: 7603
  GFR-binding peptide
  MOD_RES (2), (3), (34): Xaa is C or S

SEQ ID NO: 81075 - protein, 32 aa, Artificial Sequence
  GFR-binding peptide
  MOD_RES (32), (32): Xaa is C or S
VPTKLSAISILYLDKGVVTYLKNYQGMAVSEX

SEQ ID NO: 81076 - protein, 31 aa, Artificial Sequence; identical to SEQ ID NO: 7604
  GFR-binding peptide

SEQ ID NO: 81077 - protein, 32 aa, Artificial Sequence; identical to SEQ ID NO: 16687
  GFR-binding peptide
  MOD_RES (1), (2): Xaa is C or S

SEQ ID NO: 81078 - protein, 39 aa, Artificial Sequence; identical to SEQ ID NO: 9387
  GFR-binding peptide
  MOD_RES (4), (5), (39): Xaa is C or S
  MOD_RES (19), (20), (21), (22), (23): Xaa is A or G
  MOD_RES (24), (25), (26), (27): Xaa is A or G or is absent

SEQ ID NO: 81079 - protein, 42 aa, Artificial Sequence; identical to SEQ ID NO: 57822
  GFR-binding peptide
  MOD_RES (6), (7), (39), (41): Xaa is C or S

SEQ ID NO: 81080 - protein, 35 aa, Artificial Sequence; identical to SEQ ID NO: 7607
  GFR-binding peptide
  MOD_RES (4), (5): Xaa is C or S

SEQ ID NO: 81081 - protein, 38 aa, Artificial Sequence; identical to SEQ ID NO: 9390
  GFR-binding peptide
  MOD_RES (1), (2), (35), (37): Xaa is C or S
  MOD_RES (16), (17), (18), (19), (20): Xaa is A or G
  MOD_RES (21), (22), (23), (24): Xaa is A or G or is absent

SEQ ID NO: 81082 - protein, 36 aa, Artificial Sequence; identical to SEQ ID NO: 57825
  GFR-binding peptide
  MOD_RES (1), (34), (36): Xaa is C or S
  MOD_RES (15), (16), (17), (18), (19): Xaa is A or G
  MOD_RES (20), (21), (22), (23): Xaa is A or G or is absent

SEQ ID NO: 81083 - protein, 36 aa, Artificial Sequence; identical to SEQ ID NO: 57826
  GFR-binding peptide
  MOD_RES (3), (4), (35): Xaa is C or S

SEQ ID NO: 81084 - protein, 42 aa, Artificial Sequence
  GFR-binding peptide
  MOD_RES (4), (5), (39), (41): Xaa is C or S
  MOD_RES (19), (20), (21), (22), (23): Xaa is A or G
  MOD_RES (24), (25), (26), (27): Xaa is A or G or is absent
AGPXXTPTKMSAISMLYLXXXXXXXXXLKNYQGMVVDRXGXS

SEQ ID NO: 81085 - protein, 37 aa, Artificial Sequence; identical to SEQ ID NO: 9394
  GFR-binding peptide
  MOD_RES (35), (37): Xaa is C or S
  MOD_RES (14), (15), (16), (17), (18): Xaa is A or G
  MOD_RES (19), (20), (21), (22): Xaa is A or G or is absent

SEQ ID NO: 81086 - protein, 38 aa, Artificial Sequence; identical to SEQ ID NO: 9395
  GFR-binding peptide
  MOD_RES (3), (4), (38): Xaa is C or S
  MOD_RES (18), (19), (20), (21), (22): Xaa is A or G
  MOD_RES (23), (24), (25), (26): Xaa is A or G or is absent

SEQ ID NO: 81087 - protein, 38 aa, Artificial Sequence; identical to SEQ ID NO: 9397
  GFR-binding peptide
  MOD_RES (5), (6): Xaa is C or S
  MOD_RES (20), (21), (22), (23), (24): Xaa is A or G
  MOD_RES (25), (26), (27), (28): Xaa is A or G or is absent

SEQ ID NO: 81088 - protein, 34 aa, Artificial Sequence; identical to SEQ ID NO: 9398
  GFR-binding peptide
  MOD_RES (1), (2): Xaa is C or S
  MOD_RES (16), (17), (18), (19), (20): Xaa is A or G
  MOD_RES (21), (22), (23), (24): Xaa is A or G or is absent

SEQ ID NO: 81089 - protein, 32 aa, Artificial Sequence; identical to SEQ ID NO: 7611
  GFR-binding peptide
  MOD_RES (32), (32): Xaa is C or S

SEQ ID NO: 81090 - protein, 34 aa, Artificial Sequence
  GFR-binding peptide
  MOD_RES (33), (33): Xaa is C or S
  MOD_RES (14), (15), (16), (17), (18): Xaa is A or G
  MOD_RES (19), (20), (21), (22): Xaa is A or G or is absent
APVKTSAISMLYLXXXXXXXXXLKNYQMIVEEXG

SEQ ID NO: 81091 - protein, 34 aa, Artificial Sequence
  GFR-binding peptide
  MOD_RES (3), (4): Xaa is C or S
GPXXTPTKMSAISMLYLNDKQQIILKNYQGMVVD

SEQ ID NO: 81092 - protein, 39 aa, Artificial Sequence; identical to SEQ ID NO: 9400
  GFR-binding peptide
  MOD_RES (4), (5), (39): Xaa is C or S
  MOD_RES (19), (20), (21), (22), (23): Xaa is A or G
  MOD_RES (24), (25), (26), (27): Xaa is A or G or is absent

SEQ ID NO: 81093 - protein, 40 aa, Artificial Sequence; identical to SEQ ID NO: 57836
  GFR-binding peptide
  MOD_RES (6), (7), (39): Xaa is C or S

SEQ ID NO: 81094 - protein, 38 aa, Artificial Sequence; identical to SEQ ID NO: 9401
  GFR-binding peptide
  MOD_RES (4), (5), (38): Xaa is C or S
  MOD_RES (19), (20), (21), (22), (23): Xaa is A or G
  MOD_RES (24), (25), (26), (27): Xaa is A or G or is absent

SEQ ID NO: 81095 - protein, 43 aa, Artificial Sequence; identical to SEQ ID NO: 7614
  GFR-binding peptide
  MOD_RES (6), (7), (41), (43): Xaa is C or S
  MOD_RES (21), (22), (23), (24), (25): Xaa is A or G
  MOD_RES (26), (27), (28), (29): Xaa is A or G or is absent

SEQ ID NO: 81096 - protein, 39 aa, Artificial Sequence; identical to SEQ ID NO: 30804
  GFR-binding peptide
  MOD_RES (5), (6), (38): Xaa is C or S

SEQ ID NO: 81097 - protein, 38 aa, Artificial Sequence
  GFR-binding peptide
  MOD_RES (5), (6): Xaa is C or S
  MOD_RES (20), (21), (22), (23), (24): Xaa is A or G
  MOD_RES (25), (26), (27), (28): Xaa is A or G or is absent
SAGPXXTPTKMSAISMLYLXXXXXXXXXLKNYQGMVVD

SEQ ID NO: 81098 - protein, 39 aa, Artificial Sequence
  GFR-binding peptide
  MOD_RES (6), (7): Xaa is C or S
  MOD_RES (21), (22), (23), (24), (25): Xaa is A or G
  MOD_RES (26), (27), (28), (29): Xaa is A or G or is absent
RVPSTXXAPVKTSAISMLYLXXXXXXXXXLKNYQMIVEE

SEQ ID NO: 81099 - protein, 40 aa, Artificial Sequence
  GFR-binding peptide
  MOD_RES (6), (7), (39): Xaa is C or S
HVPKPXXAPTKLSAISVLYLDDSSNVILKNYQNMVVRSXG

SEQ ID NO: 81100 - protein, 38 aa, Artificial Sequence; identical to SEQ ID NO: 16705
  GFR-binding peptide
  MOD_RES (3), (4), (38): Xaa is C or S
  MOD_RES (18), (19), (20), (21), (22): Xaa is A or G
  MOD_RES (23), (24), (25), (26): Xaa is A or G or is absent

SEQ ID NO: 81101 - protein, 35 aa, Artificial Sequence
  GFR-binding peptide
  MOD_RES (1), (2), (34): Xaa is C or S
XXTPTKMSAISMLYLNDKQQIILKNYQGMVVDRXG

SEQ ID NO: 81102 - protein, 37 aa, Artificial Sequence
  GFR-binding peptide
  MOD_RES (4), (5), (37): Xaa is C or S
AGPXXTPTKMSAISMLYLNDKQQIILKNYQGMVVDRX

SEQ ID NO: 81103 - protein, 39 aa, Artificial Sequence
  GFR-binding peptide
  MOD_RES (3), (4), (36), (38): Xaa is C or S
KAXXVPTKLSAISILYLDKGVVTYLKNYQGMAVSEXGXR

SEQ ID NO: 81104 - protein, 36 aa, Artificial Sequence
  GFR-binding peptide
  MOD_RES (5), (6): Xaa is C or S
APASXXVPARLSAISILYLDAANNVVLKNYQDMVVE

SEQ ID NO: 81105 - protein, 34 aa, Artificial Sequence; identical to SEQ ID NO: 9404
  GFR-binding peptide
  MOD_RES (1), (2), (34): Xaa is C or S

SEQ ID NO: 81106 - protein, 35 aa, Artificial Sequence; identical to SEQ ID NO: 9405
  GFR-binding peptide
  MOD_RES (35), (35): Xaa is C or S
  MOD_RES (14), (15), (16), (17), (18): Xaa is A or G
  MOD_RES (19), (20), (21), (22): Xaa is A or G or is absent

SEQ ID NO: 81107 - protein, 41 aa, Artificial Sequence; identical to SEQ ID NO: 16710
  GFR-binding peptide
  MOD_RES (5), (6), (38), (40): Xaa is C or S

SEQ ID NO: 81108 - protein, 37 aa, Artificial Sequence; identical to SEQ ID NO: 9406
  GFR-binding peptide
  MOD_RES (4), (5), (36): Xaa is C or S

SEQ ID NO: 81109 - protein, 39 aa, Artificial Sequence; identical to SEQ ID NO: 7620
  GFR-binding peptide
  MOD_RES (6), (38): Xaa is C or S

SEQ ID NO: 81110 - protein, 35 aa, Artificial Sequence; identical to SEQ ID NO: 57845
  GFR-binding peptide
  MOD_RES (1), (2): Xaa is C or S
  MOD_RES (16), (17), (18), (19), (20): Xaa is A or G
  MOD_RES (21), (22), (23), (24): Xaa is A or G or is absent

SEQ ID NO: 81111 - protein, 38 aa, Artificial Sequence; identical to SEQ ID NO: 9408
  GFR-binding peptide
  MOD_RES (3), (4), (38): Xaa is C or S
  MOD_RES (18), (19), (20), (21), (22): Xaa is A or G
  MOD_RES (23), (24), (25), (26): Xaa is A or G or is absent

SEQ ID NO: 81112 - protein, 36 aa, Artificial Sequence; identical to SEQ ID NO: 9409
  GFR-binding peptide
  MOD_RES (1), (2), (35): Xaa is C or S

SEQ ID NO: 81113 - protein, 43 aa, Artificial Sequence; identical to SEQ ID NO: 9412
  GFR-binding peptide
  MOD_RES (6), (7), (42): Xaa is C or S
  MOD_RES (21), (22), (23), (24), (25): Xaa is A or G
  MOD_RES (26), (27), (28), (29): Xaa is A or G or is absent

SEQ ID NO: 81114 - protein, 33 aa, Artificial Sequence
  GFR-binding peptide
  MOD_RES (1), (33): Xaa is C or S
XVPEKMSAISILYLDENKNVVLKNYQNMTVESX

SEQ ID NO: 81115 - protein, 40 aa, Artificial Sequence; identical to SEQ ID NO: 16715
  GFR-binding peptide
  MOD_RES (6), (7), (39): Xaa is C or S

SEQ ID NO: 81116 - protein, 38 aa, Artificial Sequence; identical to SEQ ID NO: 28887
  GFR-binding peptide
  MOD_RES (5), (6): Xaa is C or S
  MOD_RES (20), (21), (22), (23), (24): Xaa is A or G
  MOD_RES (25), (26), (27), (28): Xaa is A or G or is absent

SEQ ID NO: 81117 - protein, 40 aa, Artificial Sequence; identical to SEQ ID NO: 7625
  GFR-binding peptide
  MOD_RES (6), (7), (39): Xaa is C or S

SEQ ID NO: 81118 - protein, 37 aa, Artificial Sequence
  GFR-binding peptide
  MOD_RES (5), (6): Xaa is C or S
APASXXVPARLSAISILYLDAANNVVLKNYQDMVVEA

SEQ ID NO: 81119 - protein, 40 aa, Artificial Sequence
  GFR-binding peptide
  MOD_RES (3), (4), (37), (39): Xaa is C or S
  MOD_RES (18), (19), (20), (21), (22): Xaa is A or G
  MOD_RES (23), (24), (25), (26): Xaa is A or G or is absent
STXXAPVKTSAISMLYLXXXXXXXXXLKNYQMIVEEXGXL

SEQ ID NO: 81120 - protein, 38 aa, Artificial Sequence; identical to SEQ ID NO: 28892
  GFR-binding peptide
  MOD_RES (3), (4), (38): Xaa is C or S
  MOD_RES (18), (19), (20), (21), (22): Xaa is A or G
  MOD_RES (23), (24), (25), (26): Xaa is A or G or is absent

SEQ ID NO: 81121 - protein, 34 aa, Artificial Sequence; identical to SEQ ID NO: 7626
  GFR-binding peptide
  MOD_RES (1), (2), (33): Xaa is C or S

SEQ ID NO: 81122 - protein, 32 aa, Artificial Sequence; identical to SEQ ID NO: 9416
  GFR-binding peptide
  MOD_RES (1), (32): Xaa is C or S

SEQ ID NO: 81123 - protein, 36 aa, Artificial Sequence; identical to SEQ ID NO: 57854
  GFR-binding peptide
  MOD_RES (1), (2), (34), (36): Xaa is C or S

SEQ ID NO: 81124 - protein, 36 aa, Artificial Sequence; identical to SEQ ID NO: 7629
  GFR-binding peptide
  MOD_RES (3), (4): Xaa is C or S
  MOD_RES (18), (19), (20), (21), (22): Xaa is A or G
  MOD_RES (23), (24), (25), (26): Xaa is A or G or is absent

SEQ ID NO: 81125 - protein, 40 aa, Artificial Sequence; identical to SEQ ID NO: 9419
  GFR-binding peptide
  MOD_RES (6), (38), (40): Xaa is C or S

SEQ ID NO: 81126 - protein, 38 aa, Artificial Sequence
  GFR-binding peptide
  MOD_RES (4), (5), (37): Xaa is C or S
PASXXVPARLSAISILYLDAANNVVLKNYQDMVVEAXG

SEQ ID NO: 81127 - protein, 36 aa, Artificial Sequence; identical to SEQ ID NO: 9420
  GFR-binding peptide
  MOD_RES (2), (3): Xaa is C or S
  MOD_RES (17), (18), (19), (20), (21): Xaa is A or G
  MOD_RES (22), (23), (24), (25): Xaa is A or G or is absent

SEQ ID NO: 81128 - protein, 38 aa, Artificial Sequence; identical to SEQ ID NO: 14940
  GFR-binding peptide
  MOD_RES (2), (3), (37): Xaa is C or S
  MOD_RES (17), (18), (19), (20), (21): Xaa is A or G
  MOD_RES (22), (23), (24), (25): Xaa is A or G or is absent

SEQ ID NO: 81129 - protein, 38 aa, Artificial Sequence
  GFR-binding peptide
  MOD_RES (4), (5), (37): Xaa is C or S
AGPXXTPTKMSAISMLYLNDKQQIILKNYQGMVVDRXG

SEQ ID NO: 81130 - protein, 35 aa, Artificial Sequence; identical to SEQ ID NO: 69985
  GFR-binding peptide
  MOD_RES (1), (33), (35): Xaa is C or S

SEQ ID NO: 81131 - protein, 37 aa, Artificial Sequence; identical to SEQ ID NO: 66583
  GFR-binding peptide
  MOD_RES (2), (3), (37): Xaa is C or S
  MOD_RES (17), (18), (19), (20), (21): Xaa is A or G
  MOD_RES (22), (23), (24), (25): Xaa is A or G or is absent

SEQ ID NO: 81132 - protein, 37 aa, Artificial Sequence
  GFR-binding peptide
  MOD_RES (3), (4), (36): Xaa is C or S
GPXXTPTKMSAISMLYLNDKQQIILKNYQGMVVDRXG

SEQ ID NO: 81133 - protein, 33 aa, Artificial Sequence
  GFR-binding peptide
  MOD_RES (1), (1): Xaa is C or S
  MOD_RES (15), (16), (17), (18), (19): Xaa is A or G
  MOD_RES (20), (21), (22), (23): Xaa is A or G or is absent
XVPARLSAISILYLXXXXXXXXXLKNYQDMVVE

SEQ ID NO: 81134 - protein, 37 aa, Artificial Sequence; identical to SEQ ID NO: 7634
  GFR-binding peptide
  MOD_RES (2), (3), (37): Xaa is C or S
  MOD_RES (17), (18), (19), (20), (21): Xaa is A or G
  MOD_RES (22), (23), (24), (25): Xaa is A or G or is absent

SEQ ID NO: 81135 - protein, 36 aa, Artificial Sequence; identical to SEQ ID NO: 7635
  GFR-binding peptide
  MOD_RES (2), (3), (34), (36): Xaa is C or S

SEQ ID NO: 81136 - protein, 32 aa, Artificial Sequence; identical to SEQ ID NO: 9429
  GFR-binding peptide
  MOD_RES (1), (32): Xaa is C or S

SEQ ID NO: 81137 - protein, 38 aa, Artificial Sequence; identical to SEQ ID NO: 9431
  GFR-binding peptide
  MOD_RES (1), (35), (37): Xaa is C or S
  MOD_RES (15), (16), (17), (18), (19): Xaa is A or G
  MOD_RES (20), (21), (22), (23): Xaa is A or G or is absent

SEQ ID NO: 81138 - protein, 39 aa, Artificial Sequence; identical to SEQ ID NO: 57867
  GFR-binding peptide
  MOD_RES (6), (7), (38): Xaa is C or S

SEQ ID NO: 81139 - protein, 38 aa, Artificial Sequence; identical to SEQ ID NO: 7639
  GFR-binding peptide
  MOD_RES (4), (5): Xaa is C or S
  MOD_RES (19), (20), (21), (22), (23): Xaa is A or G
  MOD_RES (24), (25), (26), (27): Xaa is A or G or is absent

SEQ ID NO: 81140 - protein, 41 aa, Artificial Sequence; identical to SEQ ID NO: 7640
  GFR-binding peptide
  MOD_RES (3), (4), (38), (40): Xaa is C or S
  MOD_RES (18), (19), (20), (21), (22): Xaa is A or G
  MOD_RES (23), (24), (25), (26): Xaa is A or G or is absent

SEQ ID NO: 81141 - protein, 40 aa, Artificial Sequence; identical to SEQ ID NO: 7641
  GFR-binding peptide
  MOD_RES (6), (7): Xaa is C or S
  MOD_RES (21), (22), (23), (24), (25): Xaa is A or G
  MOD_RES (26), (27), (28), (29): Xaa is A or G or is absent

SEQ ID NO: 81142 - protein, 39 aa, Artificial Sequence; identical to SEQ ID NO: 9432
  GFR-binding peptide
  MOD_RES (3), (4), (37), (39): Xaa is C or S

SEQ ID NO: 81143 - protein, 38 aa, Artificial Sequence; identical to SEQ ID NO: 9433
  GFR-binding peptide
  MOD_RES (1), (2), (35), (37): Xaa is C or S
  MOD_RES (16), (17), (18), (19), (20): Xaa is A or G
  MOD_RES (21), (22), (23), (24): Xaa is A or G or is absent

SEQ ID NO: 81144 - protein, 36 aa, Artificial Sequence; identical to SEQ ID NO: 9434
  GFR-binding peptide
  MOD_RES (1), (2), (36): Xaa is C or S
  MOD_RES (16), (17), (18), (19), (20): Xaa is A or G
  MOD_RES (21), (22), (23), (24): Xaa is A or G or is absent

SEQ ID NO: 81145 - protein, 42 aa, Artificial Sequence; identical to SEQ ID NO: 7643
  GFR-binding peptide
  MOD_RES (6), (7), (41): Xaa is C or S
  MOD_RES (21), (22), (23), (24), (25): Xaa is A or G
  MOD_RES (26), (27), (28), (29): Xaa is A or G or is absent

SEQ ID NO: 81146 - protein, 41 aa, Artificial Sequence; identical to SEQ ID NO: 16738
  GFR-binding peptide
  MOD_RES (6), (7), (39), (41): Xaa is C or S

SEQ ID NO: 81147 - protein, 39 aa, Artificial Sequence; identical to SEQ ID NO: 14954
  GFR-binding peptide
  MOD_RES (4), (5), (37), (39): Xaa is C or S

SEQ ID NO: 81148 - protein, 37 aa, Artificial Sequence
  GFR-binding peptide
  MOD_RES (2), (3), (35), (37): Xaa is C or S
PXXTPTKMSAISMLYLNDKQQIILKNYQGMVVDRXGX

SEQ ID NO: 81149 - protein, 39 aa, Artificial Sequence; identical to SEQ ID NO: 57875
  GFR-binding peptide
  MOD_RES (6), (7): Xaa is C or S
  MOD_RES (21), (22), (23), (24), (25): Xaa is A or G
  MOD_RES (26), (27), (28), (29): Xaa is A or G or is absent

SEQ ID NO: 81150 - protein, 38 aa, Artificial Sequence; identical to SEQ ID NO: 7647
  GFR-binding peptide
  MOD_RES (3), (4), (36), (38): Xaa is C or S

SEQ ID NO: 81151 - protein, 38 aa, Artificial Sequence
  GFR-binding peptide
  MOD_RES (5), (6): Xaa is C or S
  MOD_RES (20), (21), (22), (23), (24): Xaa is A or G
  MOD_RES (25), (26), (27), (28): Xaa is A or G or is absent
IPEPXXVPEKMSAISILYLXXXXXXXXXLKNYQNMTVE

SEQ ID NO: 81152 - protein, 31 aa, Artificial Sequence; identical to SEQ ID NO: 9440
  GFR-binding peptide
  MOD_RES (31), (31): Xaa is C or S

SEQ ID NO: 81153 - protein, 36 aa, Artificial Sequence; identical to SEQ ID NO: 9441
  GFR-binding peptide
  MOD_RES (2), (3), (35): Xaa is C or S

SEQ ID NO: 81154 - protein, 37 aa, Artificial Sequence
  GFR-binding peptide
  MOD_RES (4), (5), (37): Xaa is C or S
PEPXXVPEKMSAISILYLDENKNVVLKNYQNMTVESX

SEQ ID NO: 81155 - protein, 31 aa, Artificial Sequence; identical to SEQ ID NO: 70008
  GFR-binding peptide

SEQ ID NO: 81156 - protein, 34 aa, Artificial Sequence; identical to SEQ ID NO: 9443
  GFR-binding peptide
  MOD_RES (31), (33): Xaa is C or S

SEQ ID NO: 81157 - protein, 30 aa, Artificial Sequence; identical to SEQ ID NO: 9444
  GFR-binding peptide

SEQ ID NO: 81158 - protein, 41 aa, Artificial Sequence
  GFR-binding peptide
  MOD_RES (6), (7), (39), (41): Xaa is C or S
GIPEPXXVPEKMSAISILYLDENKNVVLKNYQNMTVESXAX

SEQ ID NO: 81159 - protein, 41 aa, Artificial Sequence; identical to SEQ ID NO: 7651
  GFR-binding peptide
  MOD_RES (5), (6), (40): Xaa is C or S
  MOD_RES (20), (21), (22), (23), (24): Xaa is A or G
  MOD_RES (25), (26), (27), (28): Xaa is A or G or is absent

SEQ ID NO: 81160 - protein, 39 aa, Artificial Sequence
  GFR-binding peptide
  MOD_RES (5), (6): Xaa is C or S
  MOD_RES (20), (21), (22), (23), (24): Xaa is A or G
  MOD_RES (25), (26), (27), (28): Xaa is A or G or is absent
ASKAXXVPTKLSAISILYLXXXXXXXXXLKNYQGMAVSE

SEQ ID NO: 81161 - protein, 33 aa, Artificial Sequence
  GFR-binding peptide
  MOD_RES (2), (3): Xaa is C or S
SXXVPARLSAISILYLDAANNVVLKNYQDMVVE

SEQ ID NO: 81162 - protein, 36 aa, Artificial Sequence
  GFR-binding peptide
  MOD_RES (3), (4), (36): Xaa is C or S
KAXXVPTKLSAISILYLDKGVVTYLKNYQGMAVSEX

SEQ ID NO: 81163 - protein, 38 aa, Artificial Sequence; identical to SEQ ID NO: 9446
  GFR-binding peptide
  MOD_RES (5), (6), (37): Xaa is C or S

SEQ ID NO: 81164 - protein, 35 aa, Artificial Sequence; identical to SEQ ID NO: 16748
  GFR-binding peptide
  MOD_RES (32), (34): Xaa is C or S

SEQ ID NO: 81165 - protein, 38 aa, Artificial Sequence; identical to SEQ ID NO: 9448
  GFR-binding peptide
  MOD_RES (4), (5), (36), (38): Xaa is C or S

SEQ ID NO: 81166 - protein, 42 aa, Artificial Sequence; identical to SEQ ID NO: 7654
  GFR-binding peptide
  MOD_RES (5), (6), (39), (41): Xaa is C or S
  MOD_RES (20), (21), (22), (23), (24): Xaa is A or G
  MOD_RES (25), (26), (27), (28): Xaa is A or G or is absent

SEQ ID NO: 81167 - protein, 38 aa, Artificial Sequence; identical to SEQ ID NO: 14960
  GFR-binding peptide
  MOD_RES (1), (35), (37): Xaa is C or S
  MOD_RES (15), (16), (17), (18), (19): Xaa is A or G
  MOD_RES (20), (21), (22), (23): Xaa is A or G or is absent

SEQ ID NO: 81168 - protein, 41 aa, Artificial Sequence; identical to SEQ ID NO: 9451
  GFR-binding peptide
  MOD_RES (5), (6), (41): Xaa is C or S
  MOD_RES (20), (21), (22), (23), (24): Xaa is A or G
  MOD_RES (25), (26), (27), (28): Xaa is A or G or is absent

SEQ ID NO: 81169 - protein, 42 aa, Artificial Sequence; identical to SEQ ID NO: 71674
  GFR-binding peptide
  MOD_RES (6), (7), (39), (41): Xaa is C or S

SEQ ID NO: 81170 - protein, 37 aa, Artificial Sequence; identical to SEQ ID NO: 7656
  GFR-binding peptide
  MOD_RES (3), (4), (37): Xaa is C or S

SEQ ID NO: 81171 - protein, 35 aa, Artificial Sequence; identical to SEQ ID NO: 9452
  GFR-binding peptide
  MOD_RES (3), (4), (35): Xaa is C or S

SEQ ID NO: 81172 - protein, 39 aa, Artificial Sequence; identical to SEQ ID NO: 9453
  GFR-binding peptide
  MOD_RES (5), (6): Xaa is C or S
  MOD_RES (20), (21), (22), (23), (24): Xaa is A or G
  MOD_RES (25), (26), (27), (28): Xaa is A or G or is absent

SEQ ID NO: 81173 - protein, 35 aa, Artificial Sequence; identical to SEQ ID NO: 14961
  GFR-binding peptide
  MOD_RES (3), (4): Xaa is C or S

SEQ ID NO: 81174 - protein, 36 aa, Artificial Sequence; identical to SEQ ID NO: 70015
  GFR-binding peptide
  MOD_RES (2), (3), (35): Xaa is C or S

SEQ ID NO: 81175 - protein, 32 aa, Artificial Sequence
  GFR-binding peptide
  MOD_RES (1), (2): Xaa is C or S
XXVPTKLSAISILYLDKGVVTYLKNYQGMAVS

SEQ ID NO: 81176 - protein, 36 aa, Artificial Sequence; identical to SEQ ID NO: 7658
  GFR-binding peptide
  MOD_RES (5), (6): Xaa is C or S

SEQ ID NO: 81177 - protein, 36 aa, Artificial Sequence
  GFR-binding peptide
  MOD_RES (1), (2), (36): Xaa is C or S
  MOD_RES (16), (17), (18), (19), (20): Xaa is A or G
  MOD_RES (21), (22), (23), (24): Xaa is A or G or is absent
XXVPTKLSAISILYLXXXXXXXXXLKNYQGMAVSEX

SEQ ID NO: 81178 - protein, 33 aa, Artificial Sequence; identical to SEQ ID NO: 57891
  GFR-binding peptide
  MOD_RES (2), (3): Xaa is C or S

SEQ ID NO: 81179 - protein, 34 aa, Artificial Sequence; identical to SEQ ID NO: 16758
  GFR-binding peptide
  MOD_RES (1), (1): Xaa is C or S
  MOD_RES (15), (16), (17), (18), (19): Xaa is A or G
  MOD_RES (20), (21), (22), (23): Xaa is A or G or is absent

SEQ ID NO: 81180 - protein, 39 aa, Artificial Sequence; identical to SEQ ID NO: 7659
  GFR-binding peptide
  MOD_RES (4), (5), (37), (39): Xaa is C or S

SEQ ID NO: 81181 - protein, 44 aa, Artificial Sequence
  GFR-binding peptide
  MOD_RES (6), (7), (41), (43): Xaa is C or S
  MOD_RES (21), (22), (23), (24), (25): Xaa is A or G
  MOD_RES (26), (27), (28), (29): Xaa is A or G or is absent
GIPEPXXVPEKMSAISILYLXXXXXXXXXLKNYQNMTVESXAXR

SEQ ID NO: 81182 - protein, 43 aa, Artificial Sequence; identical to SEQ ID NO: 57898
  GFR-binding peptide
  MOD_RES (5), (6), (40), (42): Xaa is C or S
  MOD_RES (20), (21), (22), (23), (24): Xaa is A or G
  MOD_RES (25), (26), (27), (28): Xaa is A or G or is absent

SEQ ID NO: 81183 - protein, 36 aa, Artificial Sequence; identical to SEQ ID NO: 9460
  GFR-binding peptide
  MOD_RES (35), (35): Xaa is C or S
  MOD_RES (14), (15), (16), (17), (18): Xaa is A or G
  MOD_RES (19), (20), (21), (22): Xaa is A or G or is absent

SEQ ID NO: 81184 - protein, 42 aa, Artificial Sequence
  GFR-binding peptide
  MOD_RES (6), (7), (40), (42): Xaa is C or S
  MOD_RES (21), (22), (23), (24), (25): Xaa is A or G
  MOD_RES (26), (27), (28), (29): Xaa is A or G or is absent
RVPSTXXAPVKTSAISMLYLXXXXXXXXXLKNYQMIVEEXGX

SEQ ID NO: 81185 - protein, 31 aa, Artificial Sequence
  GFR-binding peptide
VPARLSAISILYLDAANNVVLKNYQDMVVEA

SEQ ID NO: 81186 - protein, 40 aa, Artificial Sequence; identical to SEQ ID NO: 7662
  GFR-binding peptide
  MOD_RES (5), (6): Xaa is C or S
  MOD_RES (20), (21), (22), (23), (24): Xaa is A or G
  MOD_RES (25), (26), (27), (28): Xaa is A or G or is absent

SEQ ID NO: 81187 - protein, 38 aa, Artificial Sequence; identical to SEQ ID NO: 7663
  GFR-binding peptide
  MOD_RES (4), (5), (36), (38): Xaa is C or S

SEQ ID NO: 81188 - protein, 41 aa, Artificial Sequence; identical to SEQ ID NO: 30862
  GFR-binding peptide
  MOD_RES (6), (7), (39), (41): Xaa is C or S

SEQ ID NO: 81189 - protein, 37 aa, Artificial Sequence; identical to SEQ ID NO: 9463
  GFR-binding peptide
  MOD_RES (2), (3), (36): Xaa is C or S
  MOD_RES (17), (18), (19), (20), (21): Xaa is A or G
  MOD_RES (22), (23), (24), (25): Xaa is A or G or is absent

SEQ ID NO: 81190 - protein, 34 aa, Artificial Sequence; identical to SEQ ID NO: 16767
  GFR-binding peptide
  MOD_RES (1), (1): Xaa is C or S
  MOD_RES (15), (16), (17), (18), (19): Xaa is A or G
  MOD_RES (20), (21), (22), (23): Xaa is A or G or is absent

SEQ ID NO: 81191 - protein, 38 aa, Artificial Sequence; identical to SEQ ID NO: 57907
  GFR-binding peptide
  MOD_RES (4), (5), (36), (38): Xaa is C or S

SEQ ID NO: 81192 - protein, 34 aa, Artificial Sequence; identical to SEQ ID NO: 9466
  GFR-binding peptide
  MOD_RES (3), (4): Xaa is C or S

SEQ ID NO: 81193 - protein, 35 aa, Artificial Sequence
  GFR-binding peptide
  MOD_RES (4), (5): Xaa is C or S
PASXXVPARLSAISILYLDAANNVVLKNYQDMVVE

SEQ ID NO: 81194 - protein, 40 aa, Artificial Sequence; identical to SEQ ID NO: 7670
  GFR-binding peptide
  MOD_RES (5), (6), (38), (40): Xaa is C or S

SEQ ID NO: 81195 - protein, 41 aa, Artificial Sequence; identical to SEQ ID NO: 9467
  GFR-binding peptide
  MOD_RES (5), (6), (39), (41): Xaa is C or S
  MOD_RES (20), (21), (22), (23), (24): Xaa is A or G
  MOD_RES (25), (26), (27), (28): Xaa is A or G or is absent

SEQ ID NO: 81196 - protein, 36 aa, Artificial Sequence; identical to SEQ ID NO: 9468
  GFR-binding peptide
  MOD_RES (3), (4), (35): Xaa is C or S

SEQ ID NO: 81197 - protein, 34 aa, Artificial Sequence; identical to SEQ ID NO: 7671
  GFR-binding peptide
  MOD_RES (32), (34): Xaa is C or S

SEQ ID NO: 81198 - protein, 39 aa, Artificial Sequence; identical to SEQ ID NO: 16772
  GFR-binding peptide
  MOD_RES (6), (7), (39): Xaa is C or S

SEQ ID NO: 81199 - protein, 39 aa, Artificial Sequence; identical to SEQ ID NO: 9473
  GFR-binding peptide
  MOD_RES (6), (7): Xaa is C or S
  MOD_RES (21), (22), (23), (24), (25): Xaa is A or G
  MOD_RES (26), (27), (28), (29): Xaa is A or G or is absent

SEQ ID NO: 81200 - protein, 35 aa, Artificial Sequence; identical to SEQ ID NO: 9474
  GFR-binding peptide
  MOD_RES (2), (3), (34): Xaa is C or S

SEQ ID NO: 81201 - protein, 39 aa, Artificial Sequence; identical to SEQ ID NO: 9475
  GFR-binding peptide
  MOD_RES (5), (6), (38): Xaa is C or S

SEQ ID NO: 81202 - protein, 36 aa, Artificial Sequence; identical to SEQ ID NO: 7673
  GFR-binding peptide
  MOD_RES (2), (3), (35): Xaa is C or S

SEQ ID NO: 81203 - protein, 35 aa, Artificial Sequence; identical to SEQ ID NO: 71703
  GFR-binding peptide
  MOD_RES (32), (34): Xaa is C or S

SEQ ID NO: 81204 - protein, 37 aa, Artificial Sequence; identical to SEQ ID NO: 7675
  GFR-binding peptide
  MOD_RES (2), (3), (34), (36): Xaa is C or S

SEQ ID NO: 81205 - protein, 37 aa, Artificial Sequence; identical to SEQ ID NO: 57918
  GFR-binding peptide
  MOD_RES (5), (6), (37): Xaa is C or S

SEQ ID NO: 81206 - protein, 32 aa, Artificial Sequence; identical to SEQ ID NO: 28970
  GFR-binding peptide
  MOD_RES (32), (32): Xaa is C or S

SEQ ID NO: 81207 - protein, 37 aa, Artificial Sequence; identical to SEQ ID NO: 9479
  GFR-binding peptide
  MOD_RES (5), (6): Xaa is C or S

SEQ ID NO: 81208 - protein, 39 aa, Artificial Sequence
  GFR-binding peptide
  MOD_RES (1), (2), (36), (38): Xaa is C or S
  MOD_RES (16), (17), (18), (19), (20): Xaa is A or G
  MOD_RES (21), (22), (23), (24): Xaa is A or G or is absent
XXVPTKLSAISILYLXXXXXXXXXLKNYQGMAVSEXGXR

SEQ ID NO: 81209 - protein, 37 aa, Artificial Sequence; identical to SEQ ID NO: 30885
  GFR-binding peptide
  MOD_RES (5), (6): Xaa is C or S

SEQ ID NO: 81210 - protein, 41 aa, Artificial Sequence; identical to SEQ ID NO: 9485
  GFR-binding peptide
  MOD_RES (3), (4), (38), (40): Xaa is C or S
  MOD_RES (18), (19), (20), (21), (22): Xaa is A or G
  MOD_RES (23), (24), (25), (26): Xaa is A or G or is absent

SEQ ID NO: 81211 - protein, 37 aa, Artificial Sequence; identical to SEQ ID NO: 9486
  GFR-binding peptide
  MOD_RES (6), (7): Xaa is C or S

SEQ ID NO: 81212 - protein, 36 aa, Artificial Sequence; identical to SEQ ID NO: 9488
  GFR-binding peptide
  MOD_RES (5), (5): Xaa is C or S

SEQ ID NO: 81213 - protein, 35 aa, Artificial Sequence
  GFR-binding peptide
  MOD_RES (4), (5): Xaa is C or S
AGPXXTPTKMSAISMLYLNDKQQIILKNYQGMVVD

SEQ ID NO: 81214 - protein, 36 aa, Artificial Sequence
  GFR-binding peptide
  MOD_RES (1), (33), (35): Xaa is C or S
XTPTKMSAISMLYLNDKQQIILKNYQGMVVDRXGXS

SEQ ID NO: 81215 - protein, 34 aa, Artificial Sequence; identical to SEQ ID NO: 9490
  GFR-binding peptide
  MOD_RES (2), (3): Xaa is C or S

SEQ ID NO: 81216 - protein, 31 aa, Artificial Sequence
  GFR-binding peptide
  MOD_RES (1), (1): Xaa is C or S
XVPEKMSAISILYLDENKNVVLKNYQNMTVE

SEQ ID NO: 81217 - protein, 37 aa, Artificial Sequence; identical to SEQ ID NO: 7680
  GFR-binding peptide
  MOD_RES (1), (35), (37): Xaa is C or S
  MOD_RES (15), (16), (17), (18), (19): Xaa is A or G
  MOD_RES (20), (21), (22), (23): Xaa is A or G or is absent

SEQ ID NO: 81218 - protein, 37 aa, Artificial Sequence; identical to SEQ ID NO: 30891
  GFR-binding peptide
  MOD_RES (4), (5): Xaa is C or S
  MOD_RES (19), (20), (21), (22), (23): Xaa is A or G
  MOD_RES (24), (25), (26), (27): Xaa is A or G or is absent

SEQ ID NO: 81219 - protein, 40 aa, Artificial Sequence; identical to SEQ ID NO: 9492
  GFR-binding peptide
  MOD_RES (2), (3), (37), (39): Xaa is C or S
  MOD_RES (17), (18), (19), (20), (21): Xaa is A or G
  MOD_RES (22), (23), (24), (25): Xaa is A or G or is absent

SEQ ID NO: 81220 - protein, 35 aa, Artificial Sequence; identical to SEQ ID NO: 7682
  GFR-binding peptide
  MOD_RES (4), (5): Xaa is C or S

SEQ ID NO: 81221 - protein, 41 aa, Artificial Sequence; identical to SEQ ID NO: 7683
  GFR-binding peptide
  MOD_RES (6), (7), (40): Xaa is C or S
  MOD_RES (21), (22), (23), (24), (25): Xaa is A or G
  MOD_RES (26), (27), (28), (29): Xaa is A or G or is absent

SEQ ID NO: 81222 - protein, 40 aa, Artificial Sequence; identical to SEQ ID NO: 9493
  GFR-binding peptide
  MOD_RES (3), (4), (38), (40): Xaa is C or S
  MOD_RES (18), (19), (20), (21), (22): Xaa is A or G
  MOD_RES (23), (24), (25), (26): Xaa is A or G or is absent

SEQ ID NO: 81223 - protein, 33 aa, Artificial Sequence; identical to SEQ ID NO: 57932
  GFR-binding peptide
  MOD_RES (32), (32): Xaa is C or S

SEQ ID NO: 81224 - protein, 41 aa, Artificial Sequence; identical to SEQ ID NO: 14986
  GFR-binding peptide
  MOD_RES (3), (4), (38), (40): Xaa is C or S
  MOD_RES (18), (19), (20), (21), (22): Xaa is A or G
  MOD_RES (23), (24), (25), (26): Xaa is A or G or is absent

SEQ ID NO: 81225 - protein, 40 aa, Artificial Sequence; identical to SEQ ID NO: 7686
  GFR-binding peptide
  MOD_RES (5), (6), (39): Xaa is C or S

SEQ ID NO: 81226 - protein, 42 aa, Artificial Sequence
  GFR-binding peptide
  MOD_RES (6), (7), (41): Xaa is C or S
  MOD_RES (21), (22), (23), (24), (25): Xaa is A or G
  MOD_RES (26), (27), (28), (29): Xaa is A or G or is absent
GSAGPXXTPTKMSAISMLYLXXXXXXXXXLKNYQGMVVDRXG

SEQ ID NO: 81227 - protein, 32 aa, Artificial Sequence; identical to SEQ ID NO: 9495
  GFR-binding peptide
  MOD_RES (1), (2): Xaa is C or S

SEQ ID NO: 81228 - protein, 34 aa, Artificial Sequence; identical to SEQ ID NO: 9496
  GFR-binding peptide
  MOD_RES (1), (2): Xaa is C or S
  MOD_RES (16), (17), (18), (19), (20): Xaa is A or G
  MOD_RES (21), (22), (23), (24): Xaa is A or G or is absent

SEQ ID NO: 81229 - protein, 34 aa, Artificial Sequence
  GFR-binding peptide
  MOD_RES (1), (1): Xaa is C or S
  MOD_RES (15), (16), (17), (18), (19): Xaa is A or G
  MOD_RES (20), (21), (22), (23): Xaa is A or G or is absent
XVPEKMSAISILYLXXXXXXXXXLKNYQNMTVES

SEQ ID NO: 81230 - protein, 39 aa, Artificial Sequence; identical to SEQ ID NO: 7690
  GFR-binding peptide
  MOD_RES (6), (7): Xaa is C or S
  MOD_RES (21), (22), (23), (24), (25): Xaa is A or G
  MOD_RES (26), (27), (28), (29): Xaa is A or G or is absent

SEQ ID NO: 81231 - protein, 34 aa, Artificial Sequence
  GFR-binding peptide
  MOD_RES (3), (4): Xaa is C or S
KAXXVPTKLSAISILYLDKGVVTYLKNYQGMAVS

SEQ ID NO: 81232 - protein, 37 aa, Artificial Sequence; identical to SEQ ID NO: 7694
  GFR-binding peptide
  MOD_RES (2), (34), (36): Xaa is C or S

SEQ ID NO: 81233 - protein, 34 aa, Artificial Sequence; identical to SEQ ID NO: 9499
  GFR-binding peptide
  MOD_RES (34), (34): Xaa is C or S
  MOD_RES (14), (15), (16), (17), (18): Xaa is A or G
  MOD_RES (19), (20), (21), (22): Xaa is A or G or is absent

SEQ ID NO: 81234 - protein, 36 aa, Artificial Sequence; identical to SEQ ID NO: 9501
  GFR-binding peptide
  MOD_RES (3), (4): Xaa is C or S
  MOD_RES (18), (19), (20), (21), (22): Xaa is A or G
  MOD_RES (23), (24), (25), (26): Xaa is A or G or is absent

SEQ ID NO: 81235 - protein, 41 aa, Artificial Sequence
  GFR-binding peptide
  MOD_RES (5), (6), (38), (40): Xaa is C or S
IPEPXXVPEKMSAISILYLDENKNVVLKNYQNMTVESXAXR

SEQ ID NO: 81236 - protein, 43 aa, Artificial Sequence; identical to SEQ ID NO: 9503
  GFR-binding peptide
  MOD_RES (6), (7), (40), (42): Xaa is C or S
  MOD_RES (21), (22), (23), (24), (25): Xaa is A or G
  MOD_RES (26), (27), (28), (29): Xaa is A or G or is absent

SEQ ID NO: 81237 - protein, 33 aa, Artificial Sequence
  GFR-binding peptide
  MOD_RES (1), (33): Xaa is C or S
XTPTKMSAISMLYLNDKQQIILKNYQGMVVDRX

SEQ ID NO: 81238 - protein, 41 aa, Artificial Sequence; identical to SEQ ID NO: 9504
  GFR-binding peptide
  MOD_RES (6), (7), (38), (40): Xaa is C or S

SEQ ID NO: 81239 - protein, 35 aa, Artificial Sequence
  GFR-binding peptide
  MOD_RES (1), (33), (35): Xaa is C or S
XVPARLSAISILYLDAANNVVLKNYQDMVVEAXGX

SEQ ID NO: 81240 - protein, 35 aa, Artificial Sequence; identical to SEQ ID NO: 9505
  GFR-binding peptide
  MOD_RES (4), (5): Xaa is C or S

SEQ ID NO: 81241 - protein, 38 aa, Artificial Sequence; identical to SEQ ID NO: 7698
  GFR-binding peptide
  MOD_RES (5), (6): Xaa is C or S
  MOD_RES (20), (21), (22), (23), (24): Xaa is A or G
  MOD_RES (25), (26), (27), (28): Xaa is A or G or is absent

SEQ ID NO: 81242 - protein, 35 aa, Artificial Sequence; identical to SEQ ID NO: 9506
  GFR-binding peptide
  MOD_RES (1), (2), (34): Xaa is C or S

SEQ ID NO: 81243 - protein, 32 aa, Artificial Sequence; identical to SEQ ID NO: 57942
  GFR-binding peptide
  MOD_RES (31), (31): Xaa is C or S

SEQ ID NO: 81244 - protein, 36 aa, Artificial Sequence; identical to SEQ ID NO: 9507
  GFR-binding peptide
  MOD_RES (1), (33), (35): Xaa is C or S

SEQ ID NO: 81245 - protein, 35 aa, Artificial Sequence; identical to SEQ ID NO: 7701
  GFR-binding peptide
  MOD_RES (2), (3), (35): Xaa is C or S

SEQ ID NO: 81246 - protein, 35 aa, Artificial Sequence; identical to SEQ ID NO: 7702
  GFR-binding peptide
  MOD_RES (2), (3): Xaa is C or S
  MOD_RES (17), (18), (19), (20), (21): Xaa is A or G
  MOD_RES (22), (23), (24), (25): Xaa is A or G or is absent

SEQ ID NO: 81247 - protein, 36 aa, Artificial Sequence; identical to SEQ ID NO: 28997
  GFR-binding peptide
  MOD_RES (1), (33), (35): Xaa is C or S

SEQ ID NO: 81248 - protein, 40 aa, Artificial Sequence
  GFR-binding peptide
  MOD_RES (4), (5), (39): Xaa is C or S
  MOD_RES (19), (20), (21), (22), (23): Xaa is A or G
  MOD_RES (24), (25), (26), (27): Xaa is A or G or is absent
PASXXVPARLSAISILYLXXXXXXXXXLKNYQDMVVEAXG

SEQ ID NO: 81249 - protein, 39 aa, Artificial Sequence; identical to SEQ ID NO: 9509
  GFR-binding peptide
  MOD_RES (5), (6), (39): Xaa is C or S
  MOD_RES (20), (21), (22), (23), (24): Xaa is A or G
  MOD_RES (25), (26), (27), (28): Xaa is A or G or is absent

SEQ ID NO: 81250 - protein, 35 aa, Artificial Sequence; identical to SEQ ID NO: 7704
  GFR-binding peptide
  MOD_RES (1), (2), (33), (35): Xaa is C or S

SEQ ID NO: 81251 - protein, 35 aa, Artificial Sequence; identical to SEQ ID NO: 15003
  GFR-binding peptide
  MOD_RES (3), (4): Xaa is C or S

SEQ ID NO: 81252 - protein, 41 aa, Artificial Sequence; identical to SEQ ID NO: 16810
  GFR-binding peptide
  MOD_RES (4), (5), (39), (41): Xaa is C or S
  MOD_RES (19), (20), (21), (22), (23): Xaa is A or G
  MOD_RES (24), (25), (26), (27): Xaa is A or G or is absent

SEQ ID NO: 81253 - protein, 38 aa, Artificial Sequence; identical to SEQ ID NO: 9511
  GFR-binding peptide
  MOD_RES (3), (4), (36), (38): Xaa is C or S

SEQ ID NO: 81254 - protein, 35 aa, Artificial Sequence; identical to SEQ ID NO: 9512
  GFR-binding peptide
  MOD_RES (1), (35): Xaa is C or S
  MOD_RES (15), (16), (17), (18), (19): Xaa is A or G
  MOD_RES (20), (21), (22), (23): Xaa is A or G or is absent

SEQ ID NO: 81255 - protein, 40 aa, Artificial Sequence; identical to SEQ ID NO: 57954
  GFR-binding peptide
  MOD_RES (6), (7), (40): Xaa is C or S
  MOD_RES (21), (22), (23), (24), (25): Xaa is A or G
  MOD_RES (26), (27), (28), (29): Xaa is A or G or is absent

SEQ ID NO: 81256 - protein, 33 aa, Artificial Sequence; identical to SEQ ID NO: 9515
  GFR-binding peptide
  MOD_RES (33), (33): Xaa is C or S
  MOD_RES (14), (15), (16), (17), (18): Xaa is A or G
  MOD_RES (19), (20), (21), (22): Xaa is A or G or is absent

SEQ ID NO: 81257 - protein, 38 aa, Artificial Sequence; identical to SEQ ID NO: 16814
  GFR-binding peptide
  MOD_RES (2), (3), (37): Xaa is C or S
  MOD_RES (17), (18), (19), (20), (21): Xaa is A or G
  MOD_RES (22), (23), (24), (25): Xaa is A or G or is absent

SEQ ID NO: 81258 - protein, 39 aa, Artificial Sequence; identical to SEQ ID NO: 29009
  GFR-binding peptide
  MOD_RES (5), (6): Xaa is C or S
  MOD_RES (20), (21), (22), (23), (24): Xaa is A or G
  MOD_RES (25), (26), (27), (28): Xaa is A or G or is absent

SEQ ID NO: 81259 - protein, 38 aa, Artificial Sequence; identical to SEQ ID NO: 7712
  GFR-binding peptide
  MOD_RES (6), (38): Xaa is C or S

SEQ ID NO: 81260 - protein, 36 aa, Artificial Sequence; identical to SEQ ID NO: 9520
  GFR-binding peptide
  MOD_RES (34), (36): Xaa is C or S
  MOD_RES (14), (15), (16), (17), (18): Xaa is A or G
  MOD_RES (19), (20), (21), (22): Xaa is A or G or is absent

SEQ ID NO: 81261 - protein, 38 aa, Artificial Sequence; identical to SEQ ID NO: 7713
  GFR-binding peptide
  MOD_RES (1), (2), (35), (37): Xaa is C or S
  MOD_RES (16), (17), (18), (19), (20): Xaa is A or G
  MOD_RES (21), (22), (23), (24): Xaa is A or G or is absent

SEQ ID NO: 81262 - protein, 35 aa, Artificial Sequence; identical to SEQ ID NO: 7714
  GFR-binding peptide
  MOD_RES (1), (2), (33), (35): Xaa is C or S

SEQ ID NO: 81263 - protein, 42 aa, Artificial Sequence; identical to SEQ ID NO: 9522
  GFR-binding peptide
  MOD_RES (4), (5), (39), (41): Xaa is C or S
  MOD_RES (19), (20), (21), (22), (23): Xaa is A or G
  MOD_RES (24), (25), (26), (27): Xaa is A or G or is absent

SEQ ID NO: 81264 - protein, 33 aa, Artificial Sequence
  GFR-binding peptide
  MOD_RES (1), (1): Xaa is C or S
  MOD_RES (15), (16), (17), (18), (19): Xaa is A or G
  MOD_RES (20), (21), (22), (23): Xaa is A or G or is absent
XVPTKLSAISILYLXXXXXXXXXLKNYQGMAVS

SEQ ID NO: 81265 - protein, 34 aa, Artificial Sequence
  GFR-binding peptide
  MOD_RES (1), (2), (34): Xaa is C or S
XXVPARLSAISILYLDAANNVVLKNYQDMVVEAX

SEQ ID NO: 81266 - protein, 32 aa, Artificial Sequence; identical to SEQ ID NO: 9523
  GFR-binding peptide
  MOD_RES (31), (31): Xaa is C or S

SEQ ID NO: 81267 - protein, 39 aa, Artificial Sequence; identical to SEQ ID NO: 9525
  GFR-binding peptide
  MOD_RES (2), (3), (36), (38): Xaa is C or S
  MOD_RES (17), (18), (19), (20), (21): Xaa is A or G
  MOD_RES (22), (23), (24), (25): Xaa is A or G or is absent

SEQ ID NO: 81268 - protein, 38 aa, Artificial Sequence; identical to SEQ ID NO: 9526
  GFR-binding peptide
  MOD_RES (3), (4), (38): Xaa is C or S
  MOD_RES (18), (19), (20), (21), (22): Xaa is A or G
  MOD_RES (23), (24), (25), (26): Xaa is A or G or is absent

SEQ ID NO: 81269 - protein, 37 aa, Artificial Sequence; identical to SEQ ID NO: 30922
  GFR-binding peptide
  MOD_RES (1), (2), (34), (36): Xaa is C or S

SEQ ID NO: 81270 - protein, 41 aa, Artificial Sequence; identical to SEQ ID NO: 7718
  GFR-binding peptide
  MOD_RES (7), (39), (41): Xaa is C or S

SEQ ID NO: 81271 - protein, 39 aa, Artificial Sequence; identical to SEQ ID NO: 7719
  GFR-binding peptide
  MOD_RES (2), (3), (37), (39): Xaa is C or S
  MOD_RES (17), (18), (19), (20), (21): Xaa is A or G
  MOD_RES (22), (23), (24), (25): Xaa is A or G or is absent

SEQ ID NO: 81272 - protein, 39 aa, Artificial Sequence; identical to SEQ ID NO: 7720
  GFR-binding peptide
  MOD_RES (3), (4), (38): Xaa is C or S
  MOD_RES (18), (19), (20), (21), (22): Xaa is A or G
  MOD_RES (23), (24), (25), (26): Xaa is A or G or is absent

SEQ ID NO: 81273 - protein, 34 aa, Artificial Sequence; identical to SEQ ID NO: 7721
  GFR-binding peptide
  MOD_RES (32), (34): Xaa is C or S

SEQ ID NO: 81274 - protein, 38 aa, Artificial Sequence; identical to SEQ ID NO: 9529
  GFR-binding peptide
  MOD_RES (3), (37): Xaa is C or S
  MOD_RES (17), (18), (19), (20), (21): Xaa is A or G
  MOD_RES (22), (23), (24), (25): Xaa is A or G or is absent

SEQ ID NO: 81275 - protein, 40 aa, Artificial Sequence
  GFR-binding peptide
  MOD_RES (5), (6), (40): Xaa is C or S
  MOD_RES (20), (21), (22), (23), (24): Xaa is A or G
  MOD_RES (25), (26), (27), (28): Xaa is A or G or is absent
APASXXVPARLSAISILYLXXXXXXXXXLKNYQDMVVEAX

SEQ ID NO: 81276 - protein, 40 aa, Artificial Sequence; identical to SEQ ID NO: 9532
  GFR-binding peptide
  MOD_RES (2), (3), (37), (39): Xaa is C or S
  MOD_RES (17), (18), (19), (20), (21): Xaa is A or G
  MOD_RES (22), (23), (24), (25): Xaa is A or G or is absent

SEQ ID NO: 81277 - protein, 40 aa, Artificial Sequence; identical to SEQ ID NO: 7723
  GFR-binding peptide
  MOD_RES (6), (7): Xaa is C or S
  MOD_RES (21), (22), (23), (24), (25): Xaa is A or G
  MOD_RES (26), (27), (28), (29): Xaa is A or G or is absent

SEQ ID NO: 81278 - protein, 37 aa, Artificial Sequence
  GFR-binding peptide
  MOD_RES (1), (2), (36): Xaa is C or S
  MOD_RES (16), (17), (18), (19), (20): Xaa is A or G
  MOD_RES (21), (22), (23), (24): Xaa is A or G or is absent
XXVPEKMSAISILYLXXXXXXXXXLKNYQNMTVESXA

SEQ ID NO: 81279 - protein, 38 aa, Artificial Sequence; identical to SEQ ID NO: 15021
  GFR-binding peptide
  MOD_RES (3), (4), (36), (38): Xaa is C or S

SEQ ID NO: 81280 - protein, 39 aa, Artificial Sequence; identical to SEQ ID NO: 7726
  GFR-binding peptide
  MOD_RES (3), (4), (36), (38): Xaa is C or S

SEQ ID NO: 81281 - protein, 43 aa, Artificial Sequence; identical to SEQ ID NO: 7727
  GFR-binding peptide
  MOD_RES (6), (7), (40), (42): Xaa is C or S
  MOD_RES (21), (22), (23), (24), (25): Xaa is A or G
  MOD_RES (26), (27), (28), (29): Xaa is A or G or is absent

SEQ ID NO: 81282 - protein, 42 aa, Artificial Sequence
  GFR-binding peptide
  MOD_RES (4), (5), (39), (41): Xaa is C or S
  MOD_RES (19), (20), (21), (22), (23): Xaa is A or G
  MOD_RES (24), (25), (26), (27): Xaa is A or G or is absent
PEPXXVPEKMSAISILYLXXXXXXXXXLKNYQNMTVESXAXR

SEQ ID NO: 81283 - protein, 38 aa, Artificial Sequence; identical to SEQ ID NO: 9536
  GFR-binding peptide
  MOD_RES (6), (7): Xaa is C or S

SEQ ID NO: 81284 - protein, 32 aa, Artificial Sequence
  GFR-binding peptide
  MOD_RES (1), (2): Xaa is C or S
XXVPEKMSAISILYLDENKNVVLKNYQNMTVE

SEQ ID NO: 81285 - protein, 37 aa, Artificial Sequence; identical to SEQ ID NO: 15027
  GFR-binding peptide
  MOD_RES (34), (36): Xaa is C or S
  MOD_RES (14), (15), (16), (17), (18): Xaa is A or G
  MOD_RES (19), (20), (21), (22): Xaa is A or G or is absent

SEQ ID NO: 81286 - protein, 39 aa, Artificial Sequence; identical to SEQ ID NO: 68399
  GFR-binding peptide
  MOD_RES (5), (6), (38): Xaa is C or S

SEQ ID NO: 81287 - protein, 38 aa, Artificial Sequence; identical to SEQ ID NO: 7730
  GFR-binding peptide
  MOD_RES (5), (6): Xaa is C or S
  MOD_RES (20), (21), (22), (23), (24): Xaa is A or G
  MOD_RES (25), (26), (27), (28): Xaa is A or G or is absent

SEQ ID NO: 81288 - protein, 40 aa, Artificial Sequence; identical to SEQ ID NO: 9538
  GFR-binding peptide
  MOD_RES (5), (6), (37), (39): Xaa is C or S

SEQ ID NO: 81289 - protein, 37 aa, Artificial Sequence
  GFR-binding peptide
  MOD_RES (6), (7): Xaa is C or S
KASKAXXVPTKLSAISILYLDKGVVTYLKNYQGMAVS

SEQ ID NO: 81290 - protein, 34 aa, Artificial Sequence; identical to SEQ ID NO: 70085
  GFR-binding peptide
  MOD_RES (2), (3): Xaa is C or S

SEQ ID NO: 81291 - protein, 37 aa, Artificial Sequence; identical to SEQ ID NO: 9539
  GFR-binding peptide
  MOD_RES (4), (36): Xaa is C or S

SEQ ID NO: 81292 - protein, 38 aa, Artificial Sequence; identical to SEQ ID NO: 29032
  GFR-binding peptide
  MOD_RES (4), (5): Xaa is C or S
  MOD_RES (19), (20), (21), (22), (23): Xaa is A or G
  MOD_RES (24), (25), (26), (27): Xaa is A or G or is absent

SEQ ID NO: 81293 - protein, 33 aa, Artificial Sequence
  GFR-binding peptide
  MOD_RES (1), (2), (33): Xaa is C or S
XXAPVKTSAISMLYLDNGRVLLLKNYQMIVEEX

SEQ ID NO: 81294 - protein, 34 aa, Artificial Sequence; identical to SEQ ID NO: 7737
  GFR-binding peptide
  MOD_RES (1), (34): Xaa is C or S
  MOD_RES (15), (16), (17), (18), (19): Xaa is A or G
  MOD_RES (20), (21), (22), (23): Xaa is A or G or is absent

SEQ ID NO: 81295 - protein, 33 aa, Artificial Sequence
  GFR-binding peptide
  MOD_RES (2), (3): Xaa is C or S
PXXVPEKMSAISILYLDENKNVVLKNYQNMTVE

SEQ ID NO: 81296 - protein, 33 aa, Artificial Sequence
  GFR-binding peptide
  MOD_RES (1), (2): Xaa is C or S
XXVPARLSAISILYLDAANNVVLKNYQDMVVEA

SEQ ID NO: 81297 - protein, 41 aa, Artificial Sequence
  GFR-binding peptide
  MOD_RES (3), (4), (38), (40): Xaa is C or S
  MOD_RES (18), (19), (20), (21), (22): Xaa is A or G
  MOD_RES (23), (24), (25), (26): Xaa is A or G or is absent
GPXXTPTKMSAISMLYLXXXXXXXXXLKNYQGMVVDRXGXS

SEQ ID NO: 81298 - protein, 41 aa, Artificial Sequence; identical to SEQ ID NO: 15038
  GFR-binding peptide
  MOD_RES (6), (7), (41): Xaa is C or S
  MOD_RES (21), (22), (23), (24), (25): Xaa is A or G
  MOD_RES (26), (27), (28), (29): Xaa is A or G or is absent

SEQ ID NO: 81299 - protein, 35 aa, Artificial Sequence; identical to SEQ ID NO: 30937
  GFR-binding peptide
  MOD_RES (1), (2), (34): Xaa is C or S

SEQ ID NO: 81300 - protein, 39 aa, Artificial Sequence; identical to SEQ ID NO: 9546
  GFR-binding peptide
  MOD_RES (6), (7), (38): Xaa is C or S

SEQ ID NO: 81301 - protein, 37 aa, Artificial Sequence; identical to SEQ ID NO: 9548
  GFR-binding peptide
  MOD_RES (1), (2), (35), (37): Xaa is C or S

SEQ ID NO: 81302 - protein, 39 aa, Artificial Sequence; identical to SEQ ID NO: 7740
  GFR-binding peptide
  MOD_RES (6), (7): Xaa is C or S
  MOD_RES (21), (22), (23), (24), (25): Xaa is A or G
  MOD_RES (26), (27), (28), (29): Xaa is A or G or is absent

SEQ ID NO: 81303 - protein, 34 aa, Artificial Sequence; identical to SEQ ID NO: 15042
  GFR-binding peptide
  MOD_RES (1), (2), (34): Xaa is C or S

SEQ ID NO: 81304 - protein, 32 aa, Artificial Sequence
  GFR-binding peptide
  MOD_RES (32), (32): Xaa is C or S
VPEKMSAISILYLDENKNVVLKNYQNMTVESX

SEQ ID NO: 81305 - protein, 41 aa, Artificial Sequence; identical to SEQ ID NO: 9549
  GFR-binding peptide
  MOD_RES (4), (5), (38), (40): Xaa is C or S
  MOD_RES (19), (20), (21), (22), (23): Xaa is A or G
  MOD_RES (24), (25), (26), (27): Xaa is A or G or is absent

SEQ ID NO: 81306 - protein, 36 aa, Artificial Sequence; identical to SEQ ID NO: 68411
  GFR-binding peptide
  MOD_RES (1), (35): Xaa is C or S
  MOD_RES (15), (16), (17), (18), (19): Xaa is A or G
  MOD_RES (20), (21), (22), (23): Xaa is A or G or is absent

SEQ ID NO: 81307 - protein, 36 aa, Artificial Sequence; identical to SEQ ID NO: 16846
  GFR-binding peptide
  MOD_RES (3), (4), (36): Xaa is C or S

SEQ ID NO: 81308 - protein, 34 aa, Artificial Sequence; identical to SEQ ID NO: 7743
  GFR-binding peptide
  MOD_RES (3), (4): Xaa is C or S

SEQ ID NO: 81309 - protein, 40 aa, Artificial Sequence; identical to SEQ ID NO: 9553
  GFR-binding peptide
  MOD_RES (6), (7), (40): Xaa is C or S

SEQ ID NO: 81310 - protein, 37 aa, Artificial Sequence; identical to SEQ ID NO: 9555
  GFR-binding peptide
  MOD_RES (1), (2), (37): Xaa is C or S
  MOD_RES (16), (17), (18), (19), (20): Xaa is A or G
  MOD_RES (21), (22), (23), (24): Xaa is A or G or is absent

SEQ ID NO: 81311 - protein, 32 aa, Artificial Sequence; identical to SEQ ID NO: 9556
  GFR-binding peptide
  MOD_RES (1), (1): Xaa is C or S

SEQ ID NO: 81312 - protein, 36 aa, Artificial Sequence; identical to SEQ ID NO: 7745
  GFR-binding peptide
  MOD_RES (2), (3), (34), (36): Xaa is C or S

SEQ ID NO: 81313 - protein, 34 aa, Artificial Sequence; identical to SEQ ID NO: 7746
  GFR-binding peptide
  MOD_RES (32), (34): Xaa is C or S

SEQ ID NO: 81314 - protein, 39 aa, Artificial Sequence; identical to SEQ ID NO: 57991
  GFR-binding peptide
  MOD_RES (5), (6), (38): Xaa is C or S

SEQ ID NO: 81315 - protein, 41 aa, Artificial Sequence; identical to SEQ ID NO: 7748
  GFR-binding peptide
  MOD_RES (4), (5), (39), (41): Xaa is C or S
  MOD_RES (19), (20), (21), (22), (23): Xaa is A or G
  MOD_RES (24), (25), (26), (27): Xaa is A or G or is absent

SEQ ID NO: 81316 - protein, 33 aa, Artificial Sequence; identical to SEQ ID NO: 57994
  GFR-binding peptide
  MOD_RES (33), (33): Xaa is C or S
  MOD_RES (14), (15), (16), (17), (18): Xaa is A or G
  MOD_RES (19), (20), (21), (22): Xaa is A or G or is absent

SEQ ID NO: 81317 - protein, 39 aa, Artificial Sequence; identical to SEQ ID NO: 7749
  GFR-binding peptide
  MOD_RES (4), (5), (38): Xaa is C or S
  MOD_RES (19), (20), (21), (22), (23): Xaa is A or G
  MOD_RES (24), (25), (26), (27): Xaa is A or G or is absent

SEQ ID NO: 81318 - protein, 38 aa, Artificial Sequence; identical to SEQ ID NO: 7750
  GFR-binding peptide
  MOD_RES (4), (38): Xaa is C or S
  MOD_RES (18), (19), (20), (21), (22): Xaa is A or G
  MOD_RES (23), (24), (25), (26): Xaa is A or G or is absent

SEQ ID NO: 81319 - protein, 40 aa, Artificial Sequence
  GFR-binding peptide
  MOD_RES (6), (7): Xaa is C or S
  MOD_RES (21), (22), (23), (24), (25): Xaa is A or G
  MOD_RES (26), (27), (28), (29): Xaa is A or G or is absent
GIPEPXXVPEKMSAISILYLXXXXXXXXXLKNYQNMTVES

SEQ ID NO: 81320 - protein, 34 aa, Artificial Sequence; identical to SEQ ID NO: 9559
  GFR-binding peptide
  MOD_RES (1), (32), (34): Xaa is C or S

SEQ ID NO: 81321 - protein, 33 aa, Artificial Sequence; identical to SEQ ID NO: 9560
  GFR-binding peptide
  MOD_RES (14), (15), (16), (17), (18): Xaa is A or G
  MOD_RES (19), (20), (21), (22): Xaa is A or G or is absent

SEQ ID NO: 81322 - protein, 37 aa, Artificial Sequence; identical to SEQ ID NO: 16856
  GFR-binding peptide
  MOD_RES (5), (6): Xaa is C or S

SEQ ID NO: 81323 - protein, 40 aa, Artificial Sequence; identical to SEQ ID NO: 9562
  GFR-binding peptide
  MOD_RES (5), (6), (39): Xaa is C or S
  MOD_RES (20), (21), (22), (23), (24): Xaa is A or G
  MOD_RES (25), (26), (27), (28): Xaa is A or G or is absent

SEQ ID NO: 81324 - protein, 40 aa, Artificial Sequence
  GFR-binding peptide
  MOD_RES (6), (7), (38), (40): Xaa is C or S
RVPSTXXAPVKTSAISMLYLDNGRVLLLKNYQMIVEEXGX

SEQ ID NO: 81325 - protein, 36 aa, Artificial Sequence; identical to SEQ ID NO: 7752
  GFR-binding peptide
  MOD_RES (2), (3), (36): Xaa is C or S
  MOD_RES (17), (18), (19), (20), (21): Xaa is A or G
  MOD_RES (22), (23), (24), (25): Xaa is A or G or is absent

SEQ ID NO: 81326 - protein, 43 aa, Artificial Sequence; identical to SEQ ID NO: 16861
  GFR-binding peptide
  MOD_RES (5), (6), (40), (42): Xaa is C or S
  MOD_RES (20), (21), (22), (23), (24): Xaa is A or G
  MOD_RES (25), (26), (27), (28): Xaa is A or G or is absent

SEQ ID NO: 81327 - protein, 41 aa, Artificial Sequence; identical to SEQ ID NO: 9565
  GFR-binding peptide
  MOD_RES (3), (4), (39), (41): Xaa is C or S
  MOD_RES (18), (19), (20), (21), (22): Xaa is A or G
  MOD_RES (23), (24), (25), (26): Xaa is A or G or is absent

SEQ ID NO: 81328 - protein, 33 aa, Artificial Sequence; identical to SEQ ID NO: 7755
  GFR-binding peptide
  MOD_RES (2), (3): Xaa is C or S

SEQ ID NO: 81329 - protein, 37 aa, Artificial Sequence; identical to SEQ ID NO: 58001
  GFR-binding peptide
  MOD_RES (34), (36): Xaa is C or S
  MOD_RES (14), (15), (16), (17), (18): Xaa is A or G
  MOD_RES (19), (20), (21), (22): Xaa is A or G or is absent

SEQ ID NO: 81330 - protein, 39 aa, Artificial Sequence; identical to SEQ ID NO: 7756
  GFR-binding peptide
  MOD_RES (5), (39): Xaa is C or S
  MOD_RES (19), (20), (21), (22), (23): Xaa is A or G
  MOD_RES (24), (25), (26), (27): Xaa is A or G or is absent

SEQ ID NO: 81331 - protein, 35 aa, Artificial Sequence; identical to SEQ ID NO: 58002
  GFR-binding peptide
  MOD_RES (2), (3), (35): Xaa is C or S

SEQ ID NO: 81332 - protein, 42 aa, Artificial Sequence; identical to SEQ ID NO: 29060
  GFR-binding peptide
  MOD_RES (6), (7), (39), (41): Xaa is C or S

SEQ ID NO: 81333 - protein, 37 aa, Artificial Sequence; identical to SEQ ID NO: 66704
  GFR-binding peptide
  MOD_RES (1), (35), (37): Xaa is C or S
  MOD_RES (15), (16), (17), (18), (19): Xaa is A or G
  MOD_RES (20), (21), (22), (23): Xaa is A or G or is absent

SEQ ID NO: 81334 - protein, 36 aa, Artificial Sequence; identical to SEQ ID NO: 9571
  GFR-binding peptide
  MOD_RES (33), (35): Xaa is C or S
  MOD_RES (14), (15), (16), (17), (18): Xaa is A or G
  MOD_RES (19), (20), (21), (22): Xaa is A or G or is absent

SEQ ID NO: 81335 - protein, 31 aa, Artificial Sequence; identical to SEQ ID NO: 16866
  GFR-binding peptide
  MOD_RES (1), (1): Xaa is C or S

SEQ ID NO: 81336 - protein, 38 aa, Artificial Sequence
  GFR-binding peptide
  MOD_RES (5), (6): Xaa is C or S
  MOD_RES (20), (21), (22), (23), (24): Xaa is A or G
  MOD_RES (25), (26), (27), (28): Xaa is A or G or is absent
APASXXVPARLSAISILYLXXXXXXXXXLKNYQDMVVE

SEQ ID NO: 81337 - protein, 33 aa, Artificial Sequence; identical to SEQ ID NO: 9572
  GFR-binding peptide
  MOD_RES (1), (1): Xaa is C or S
  MOD_RES (15), (16), (17), (18), (19): Xaa is A or G
  MOD_RES (20), (21), (22), (23): Xaa is A or G or is absent

SEQ ID NO: 81338 - protein, 38 aa, Artificial Sequence; identical to SEQ ID NO: 16870
  GFR-binding peptide
  MOD_RES (5), (6), (38): Xaa is C or S

SEQ ID NO: 81339 - protein, 39 aa, Artificial Sequence; identical to SEQ ID NO: 7767
  GFR-binding peptide
  MOD_RES (4), (5), (37), (39): Xaa is C or S

SEQ ID NO: 81340 - protein, 40 aa, Artificial Sequence; identical to SEQ ID NO: 7768
  GFR-binding peptide
  MOD_RES (3), (4), (38), (40): Xaa is C or S
  MOD_RES (18), (19), (20), (21), (22): Xaa is A or G
  MOD_RES (23), (24), (25), (26): Xaa is A or G or is absent

SEQ ID NO: 81341 - protein, 41 aa, Artificial Sequence; identical to SEQ ID NO: 9576
  GFR-binding peptide
  MOD_RES (3), (4), (38), (40): Xaa is C or S
  MOD_RES (18), (19), (20), (21), (22): Xaa is A or G
  MOD_RES (23), (24), (25), (26): Xaa is A or G or is absent

SEQ ID NO: 81342 - protein, 38 aa, Artificial Sequence; identical to SEQ ID NO: 30971
  GFR-binding peptide
  MOD_RES (3), (4), (38): Xaa is C or S
  MOD_RES (18), (19), (20), (21), (22): Xaa is A or G
  MOD_RES (23), (24), (25), (26): Xaa is A or G or is absent

SEQ ID NO: 81343 - protein, 35 aa, Artificial Sequence; identical to SEQ ID NO: 71796
  GFR-binding peptide
  MOD_RES (1), (2): Xaa is C or S
  MOD_RES (16), (17), (18), (19), (20): Xaa is A or G
  MOD_RES (21), (22), (23), (24): Xaa is A or G or is absent

SEQ ID NO: 81344 - protein, 38 aa, Artificial Sequence; identical to SEQ ID NO: 9577
  GFR-binding peptide
  MOD_RES (4), (5), (37): Xaa is C or S

SEQ ID NO: 81345 - protein, 34 aa, Artificial Sequence; identical to SEQ ID NO: 9579
  GFR-binding peptide
  MOD_RES (3), (4): Xaa is C or S

SEQ ID NO: 81346 - protein, 41 aa, Artificial Sequence; identical to SEQ ID NO: 9580
  GFR-binding peptide
  MOD_RES (6), (7), (41): Xaa is C or S
  MOD_RES (21), (22), (23), (24), (25): Xaa is A or G
  MOD_RES (26), (27), (28), (29): Xaa is A or G or is absent

SEQ ID NO: 81347 - protein, 37 aa, Artificial Sequence; identical to SEQ ID NO: 9581
  GFR-binding peptide
  MOD_RES (4), (5): Xaa is C or S
  MOD_RES (19), (20), (21), (22), (23): Xaa is A or G
  MOD_RES (24), (25), (26), (27): Xaa is A or G or is absent

SEQ ID NO: 81348 - protein, 35 aa, Artificial Sequence
  GFR-binding peptide
  MOD_RES (1), (2): Xaa is C or S
  MOD_RES (16), (17), (18), (19), (20): Xaa is A or G
  MOD_RES (21), (22), (23), (24): Xaa is A or G or is absent
XXVPEKMSAISILYLXXXXXXXXXLKNYQNMTVES

SEQ ID NO: 81349 - protein, 39 aa, Artificial Sequence; identical to SEQ ID NO: 29070
  GFR-binding peptide
  MOD_RES (5), (6), (38): Xaa is C or S

SEQ ID NO: 81350 - protein, 33 aa, Artificial Sequence
  GFR-binding peptide
  MOD_RES (32), (32): Xaa is C or S
TPTKMSAISMLYLNDKQQIILKNYQGMVVDRXG

SEQ ID NO: 81351 - protein, 36 aa, Artificial Sequence; identical to SEQ ID NO: 7771
  GFR-binding peptide
  MOD_RES (4), (5), (36): Xaa is C or S

SEQ ID NO: 81352 - protein, 36 aa, Artificial Sequence; identical to SEQ ID NO: 58018
  GFR-binding peptide
  MOD_RES (1), (35): Xaa is C or S
  MOD_RES (15), (16), (17), (18), (19): Xaa is A or G
  MOD_RES (20), (21), (22), (23): Xaa is A or G or is absent

SEQ ID NO: 81353 - protein, 39 aa, Artificial Sequence; identical to SEQ ID NO: 9585
  GFR-binding peptide
  MOD_RES (5), (6), (39): Xaa is C or S

SEQ ID NO: 81354 - protein, 35 aa, Artificial Sequence; identical to SEQ ID NO: 9586
  GFR-binding peptide
  MOD_RES (1), (2), (34): Xaa is C or S

SEQ ID NO: 81355 - protein, 36 aa, Artificial Sequence; identical to SEQ ID NO: 9591
  GFR-binding peptide
  MOD_RES (1), (34), (36): Xaa is C or S
  MOD_RES (15), (16), (17), (18), (19): Xaa is A or G
  MOD_RES (20), (21), (22), (23): Xaa is A or G or is absent

SEQ ID NO: 81356 - protein, 40 aa, Artificial Sequence; identical to SEQ ID NO: 9593
  GFR-binding peptide
  MOD_RES (5), (6), (40): Xaa is C or S
  MOD_RES (20), (21), (22), (23), (24): Xaa is A or G
  MOD_RES (25), (26), (27), (28): Xaa is A or G or is absent

SEQ ID NO: 81357 - protein, 38 aa, Artificial Sequence; identical to SEQ ID NO: 70127
  GFR-binding peptide
  MOD_RES (3), (4), (36), (38): Xaa is C or S

SEQ ID NO: 81358 - protein, 32 aa, Artificial Sequence; identical to SEQ ID NO: 9595
  GFR-binding peptide
  MOD_RES (14), (15), (16), (17), (18): Xaa is A or G
  MOD_RES (19), (20), (21), (22): Xaa is A or G or is absent

SEQ ID NO: 81359 - protein, 43 aa, Artificial Sequence
  GFR-binding peptide
  MOD_RES (5), (6), (40), (42): Xaa is C or S
  MOD_RES (20), (21), (22), (23), (24): Xaa is A or G
  MOD_RES (25), (26), (27), (28): Xaa is A or G or is absent
ASKAXXVPTKLSAISILYLXXXXXXXXXLKNYQGMAVSEXGXR

SEQ ID NO: 81360 - protein, 41 aa, Artificial Sequence; identical to SEQ ID NO: 7774
  GFR-binding peptide
  MOD_RES (2), (3), (38), (40): Xaa is C or S
  MOD_RES (17), (18), (19), (20), (21): Xaa is A or G
  MOD_RES (22), (23), (24), (25): Xaa is A or G or is absent

SEQ ID NO: 81361 - protein, 36 aa, Artificial Sequence; identical to SEQ ID NO: 9596
  GFR-binding peptide
  MOD_RES (6), (6): Xaa is C or S

SEQ ID NO: 81362 - protein, 42 aa, Artificial Sequence; identical to SEQ ID NO: 9598
  GFR-binding peptide
  MOD_RES (6), (7), (40), (42): Xaa is C or S
  MOD_RES (21), (22), (23), (24), (25): Xaa is A or G
  MOD_RES (26), (27), (28), (29): Xaa is A or G or is absent

SEQ ID NO: 81363 - protein, 37 aa, Artificial Sequence; identical to SEQ ID NO: 30992
  GFR-binding peptide
  MOD_RES (2), (3), (35), (37): Xaa is C or S

SEQ ID NO: 81364 - protein, 36 aa, Artificial Sequence; identical to SEQ ID NO: 7775
  GFR-binding peptide
  MOD_RES (2), (3), (35): Xaa is C or S

SEQ ID NO: 81365 - protein, 34 aa, Artificial Sequence; identical to SEQ ID NO: 7777
  GFR-binding peptide
  MOD_RES (33), (33): Xaa is C or S
  MOD_RES (14), (15), (16), (17), (18): Xaa is A or G
  MOD_RES (19), (20), (21), (22): Xaa is A or G or is absent

SEQ ID NO: 81366 - protein, 37 aa, Artificial Sequence
  GFR-binding peptide
  MOD_RES (1), (34), (36): Xaa is C or S
  MOD_RES (15), (16), (17), (18), (19): Xaa is A or G
  MOD_RES (20), (21), (22), (23): Xaa is A or G or is absent
XAPVKTSAISMLYLXXXXXXXXXLKNYQMIVEEXGXL

SEQ ID NO: 81367 - protein, 38 aa, Artificial Sequence; identical to SEQ ID NO: 7778
  GFR-binding peptide
  MOD_RES (3), (4), (36), (38): Xaa is C or S

SEQ ID NO: 81368 - protein, 41 aa, Artificial Sequence; identical to SEQ ID NO: 29077
  GFR-binding peptide
  MOD_RES (3), (4), (38), (40): Xaa is C or S
  MOD_RES (18), (19), (20), (21), (22): Xaa is A or G
  MOD_RES (23), (24), (25), (26): Xaa is A or G or is absent

SEQ ID NO: 81369 - protein, 40 aa, Artificial Sequence; identical to SEQ ID NO: 9600
  GFR-binding peptide
  MOD_RES (6), (7), (40): Xaa is C or S
  MOD_RES (21), (22), (23), (24), (25): Xaa is A or G
  MOD_RES (26), (27), (28), (29): Xaa is A or G or is absent

SEQ ID NO: 81370 - protein, 37 aa, Artificial Sequence; identical to SEQ ID NO: 7780
  GFR-binding peptide
  MOD_RES (5), (6), (37): Xaa is C or S

SEQ ID NO: 81371 - protein, 39 aa, Artificial Sequence
  GFR-binding peptide
  MOD_RES (4), (5), (39): Xaa is C or S
  MOD_RES (19), (20), (21), (22), (23): Xaa is A or G
  MOD_RES (24), (25), (26), (27): Xaa is A or G or is absent
PEPXXVPEKMSAISILYLXXXXXXXXXLKNYQNMTVESX

SEQ ID NO: 81372 - protein, 40 aa, Artificial Sequence; identical to SEQ ID NO: 70135
  GFR-binding peptide
  MOD_RES (6), (7): Xaa is C or S
  MOD_RES (21), (22), (23), (24), (25): Xaa is A or G
  MOD_RES (26), (27), (28), (29): Xaa is A or G or is absent

SEQ ID NO: 81373 - protein, 39 aa, Artificial Sequence; identical to SEQ ID NO: 15087
  GFR-binding peptide
  MOD_RES (3), (4), (36), (38): Xaa is C or S

SEQ ID NO: 81374 - protein, 33 aa, Artificial Sequence; identical to SEQ ID NO: 30998
  GFR-binding peptide
  MOD_RES (32), (32): Xaa is C or S

SEQ ID NO: 81375 - protein, 34 aa, Artificial Sequence; identical to SEQ ID NO: 7784
  GFR-binding peptide
  MOD_RES (2), (2): Xaa is C or S
  MOD_RES (16), (17), (18), (19), (20): Xaa is A or G
  MOD_RES (21), (22), (23), (24): Xaa is A or G or is absent

SEQ ID NO: 81376 - protein, 34 aa, Artificial Sequence; identical to SEQ ID NO: 15090
  GFR-binding peptide
  MOD_RES (1), (2): Xaa is C or S
  MOD_RES (16), (17), (18), (19), (20): Xaa is A or G
  MOD_RES (21), (22), (23), (24): Xaa is A or G or is absent

SEQ ID NO: 81377 - protein, 42 aa, Artificial Sequence
  GFR-binding peptide
  MOD_RES (6), (7), (39), (41): Xaa is C or S
HVPKPXXAPTKLSAISVLYLDDSSNVILKNYQNMVVRSXGXH

SEQ ID NO: 81378 - protein, 37 aa, Artificial Sequence; identical to SEQ ID NO: 7787
  GFR-binding peptide
  MOD_RES (1), (2), (36): Xaa is C or S
  MOD_RES (16), (17), (18), (19), (20): Xaa is A or G
  MOD_RES (21), (22), (23), (24): Xaa is A or G or is absent

SEQ ID NO: 81379 - protein, 36 aa, Artificial Sequence; identical to SEQ ID NO: 70140
  GFR-binding peptide
  MOD_RES (1), (33), (35): Xaa is C or S

SEQ ID NO: 81380 - protein, 36 aa, Artificial Sequence
  GFR-binding peptide
  MOD_RES (2), (3), (35): Xaa is C or S
AXXVPTKLSAISILYLDKGVVTYLKNYQGMAVSEXG

SEQ ID NO: 81381 - protein, 33 aa, Artificial Sequence
  GFR-binding peptide
  MOD_RES (14), (15), (16), (17), (18): Xaa is A or G
  MOD_RES (19), (20), (21), (22): Xaa is A or G or is absent
VPARLSAISILYLXXXXXXXXXLKNYQDMVVEA

SEQ ID NO: 81382 - protein, 34 aa, Artificial Sequence; identical to SEQ ID NO: 71825
  GFR-binding peptide
  MOD_RES (1), (1): Xaa is C or S
  MOD_RES (15), (16), (17), (18), (19): Xaa is A or G
  MOD_RES (20), (21), (22), (23): Xaa is A or G or is absent

SEQ ID NO: 81383 - protein, 32 aa, Artificial Sequence; identical to SEQ ID NO: 7791
  GFR-binding peptide
  MOD_RES (32), (32): Xaa is C or S

SEQ ID NO: 81384 - protein, 43 aa, Artificial Sequence; identical to SEQ ID NO: 9612
  GFR-binding peptide
  MOD_RES (6), (7), (40), (42): Xaa is C or S

SEQ ID NO: 81385 - protein, 41 aa, Artificial Sequence; identical to SEQ ID NO: 7793
  GFR-binding peptide
  MOD_RES (4), (5), (39), (41): Xaa is C or S
  MOD_RES (19), (20), (21), (22), (23): Xaa is A or G
  MOD_RES (24), (25), (26), (27): Xaa is A or G or is absent

SEQ ID NO: 81386 - protein, 38 aa, Artificial Sequence; identical to SEQ ID NO: 15103
  GFR-binding peptide
  MOD_RES (2), (3), (35), (37): Xaa is C or S

SEQ ID NO: 81387 - protein, 37 aa, Artificial Sequence; identical to SEQ ID NO: 16898
  GFR-binding peptide
  MOD_RES (1), (2), (36): Xaa is C or S
  MOD_RES (16), (17), (18), (19), (20): Xaa is A or G
  MOD_RES (21), (22), (23), (24): Xaa is A or G or is absent

SEQ ID NO: 81388 - protein, 38 aa, Artificial Sequence
  GFR-binding peptide
  MOD_RES (4), (5): Xaa is C or S
  MOD_RES (19), (20), (21), (22), (23): Xaa is A or G
  MOD_RES (24), (25), (26), (27): Xaa is A or G or is absent
AGPXXTPTKMSAISMLYLXXXXXXXXXLKNYQGMVVDR

SEQ ID NO: 81389 - protein, 42 aa, Artificial Sequence; identical to SEQ ID NO: 9614
  GFR-binding peptide
  MOD_RES (6), (7), (41): Xaa is C or S
  MOD_RES (21), (22), (23), (24), (25): Xaa is A or G
  MOD_RES (26), (27), (28), (29): Xaa is A or G or is absent

SEQ ID NO: 81390 - protein, 36 aa, Artificial Sequence; identical to SEQ ID NO: 15108
  GFR-binding peptide
  MOD_RES (2), (3): Xaa is C or S
  MOD_RES (17), (18), (19), (20), (21): Xaa is A or G
  MOD_RES (22), (23), (24), (25): Xaa is A or G or is absent

SEQ ID NO: 81391 - protein, 35 aa, Artificial Sequence; identical to SEQ ID NO: 16902
  GFR-binding peptide
  MOD_RES (1), (2): Xaa is C or S
  MOD_RES (16), (17), (18), (19), (20): Xaa is A or G
  MOD_RES (21), (22), (23), (24): Xaa is A or G or is absent

SEQ ID NO: 81392 - protein, 39 aa, Artificial Sequence; identical to SEQ ID NO: 7798
  GFR-binding peptide
  MOD_RES (5), (6), (39): Xaa is C or S

SEQ ID NO: 81393 - protein, 44 aa, Artificial Sequence; identical to SEQ ID NO: 15109
  GFR-binding peptide
  MOD_RES (6), (7), (41), (43): Xaa is C or S
  MOD_RES (21), (22), (23), (24), (25): Xaa is A or G
  MOD_RES (26), (27), (28), (29): Xaa is A or G or is absent

SEQ ID NO: 81394 - protein, 35 aa, Artificial Sequence; identical to SEQ ID NO: 9621
  GFR-binding peptide
  MOD_RES (1), (2): Xaa is C or S
  MOD_RES (16), (17), (18), (19), (20): Xaa is A or G
  MOD_RES (21), (22), (23), (24): Xaa is A or G or is absent

SEQ ID NO: 81395 - protein, 40 aa, Artificial Sequence; identical to SEQ ID NO: 9622
  GFR-binding peptide
  MOD_RES (4), (5), (38), (40): Xaa is C or S
  MOD_RES (19), (20), (21), (22), (23): Xaa is A or G
  MOD_RES (24), (25), (26), (27): Xaa is A or G or is absent

SEQ ID NO: 81396 - protein, 40 aa, Artificial Sequence
  GFR-binding peptide
  MOD_RES (6), (7), (39): Xaa is C or S
AAPASXXVPARLSAISILYLDAANNVVLKNYQDMVVEAXG

SEQ ID NO: 81397 - protein, 39 aa, Artificial Sequence; identical to SEQ ID NO: 70154
  GFR-binding peptide
  MOD_RES (4), (5), (37), (39): Xaa is C or S

SEQ ID NO: 81398 - protein, 36 aa, Artificial Sequence; identical to SEQ ID NO: 29096
  GFR-binding peptide
  MOD_RES (1), (35): Xaa is C or S
  MOD_RES (15), (16), (17), (18), (19): Xaa is A or G
  MOD_RES (20), (21), (22), (23): Xaa is A or G or is absent

SEQ ID NO: 81399 - protein, 37 aa, Artificial Sequence; identical to SEQ ID NO: 9624
  GFR-binding peptide
  MOD_RES (2), (3), (37): Xaa is C or S
  MOD_RES (17), (18), (19), (20), (21): Xaa is A or G
  MOD_RES (22), (23), (24), (25): Xaa is A or G or is absent

SEQ ID NO: 81400 - protein, 42 aa, Artificial Sequence; identical to SEQ ID NO: 7801
  GFR-binding peptide
  MOD_RES (4), (5), (39), (41): Xaa is C or S
  MOD_RES (19), (20), (21), (22), (23): Xaa is A or G
  MOD_RES (24), (25), (26), (27): Xaa is A or G or is absent

SEQ ID NO: 81401 - protein, 39 aa, Artificial Sequence; identical to SEQ ID NO: 29098
  GFR-binding peptide
  MOD_RES (4), (5), (37), (39): Xaa is C or S

SEQ ID NO: 81402 - protein, 39 aa, Artificial Sequence; identical to SEQ ID NO: 16910
  GFR-binding peptide
  MOD_RES (4), (5), (39): Xaa is C or S
  MOD_RES (19), (20), (21), (22), (23): Xaa is A or G
  MOD_RES (24), (25), (26), (27): Xaa is A or G or is absent

SEQ ID NO: 81403 - protein, 37 aa, Artificial Sequence
  GFR-binding peptide
  MOD_RES (3), (4), (35), (37): Xaa is C or S
STXXAPVKTSAISMLYLDNGRVLLLKNYQMIVEEXGX

SEQ ID NO: 81404 - protein, 37 aa, Artificial Sequence; identical to SEQ ID NO: 16912
  GFR-binding peptide
  MOD_RES (6), (7): Xaa is C or S

SEQ ID NO: 81405 - protein, 40 aa, Artificial Sequence; identical to SEQ ID NO: 7806
  GFR-binding peptide
  MOD_RES (2), (3), (37), (39): Xaa is C or S
  MOD_RES (17), (18), (19), (20), (21): Xaa is A or G
  MOD_RES (22), (23), (24), (25): Xaa is A or G or is absent

SEQ ID NO: 81406 - protein, 31 aa, Artificial Sequence
  GFR-binding peptide
  MOD_RES (1), (1): Xaa is C or S
XVPTKLSAISILYLDKGVVTYLKNYQGMAVS

SEQ ID NO: 81407 - protein, 42 aa, Artificial Sequence; identical to SEQ ID NO: 16914
  GFR-binding peptide
  MOD_RES (4), (5), (39), (41): Xaa is C or S
  MOD_RES (19), (20), (21), (22), (23): Xaa is A or G
  MOD_RES (24), (25), (26), (27): Xaa is A or G or is absent

SEQ ID NO: 81408 - protein, 40 aa, Artificial Sequence; identical to SEQ ID NO: 7808
  GFR-binding peptide
  MOD_RES (5), (6), (40): Xaa is C or S
  MOD_RES (20), (21), (22), (23), (24): Xaa is A or G
  MOD_RES (25), (26), (27), (28): Xaa is A or G or is absent

SEQ ID NO: 81409 - protein, 40 aa, Artificial Sequence; identical to SEQ ID NO: 7809
  GFR-binding peptide
  MOD_RES (5), (6), (39): Xaa is C or S
  MOD_RES (20), (21), (22), (23), (24): Xaa is A or G
  MOD_RES (25), (26), (27), (28): Xaa is A or G or is absent

SEQ ID NO: 81410 - protein, 35 aa, Artificial Sequence
  GFR-binding peptide
  MOD_RES (3), (4), (35): Xaa is C or S
STXXAPVKTSAISMLYLDNGRVLLLKNYQMIVEEX

SEQ ID NO: 81411 - protein, 41 aa, Artificial Sequence; identical to SEQ ID NO: 71859
  GFR-binding peptide
  MOD_RES (5), (6), (40): Xaa is C or S
  MOD_RES (20), (21), (22), (23), (24): Xaa is A or G
  MOD_RES (25), (26), (27), (28): Xaa is A or G or is absent

SEQ ID NO: 81412 - protein, 39 aa, Artificial Sequence; identical to SEQ ID NO: 7813
  GFR-binding peptide
  MOD_RES (6), (7): Xaa is C or S
  MOD_RES (21), (22), (23), (24), (25): Xaa is A or G
  MOD_RES (26), (27), (28), (29): Xaa is A or G or is absent

SEQ ID NO: 81413 - protein, 42 aa, Artificial Sequence; identical to SEQ ID NO: 7814
  GFR-binding peptide
  MOD_RES (6), (7), (42): Xaa is C or S
  MOD_RES (21), (22), (23), (24), (25): Xaa is A or G
  MOD_RES (26), (27), (28), (29): Xaa is A or G or is absent

SEQ ID NO: 81414 - protein, 40 aa, Artificial Sequence
  GFR-binding peptide
  MOD_RES (4), (5), (38), (40): Xaa is C or S
  MOD_RES (19), (20), (21), (22), (23): Xaa is A or G
  MOD_RES (24), (25), (26), (27): Xaa is A or G or is absent
PSTXXAPVKTSAISMLYLXXXXXXXXXLKNYQMIVEEXGX

SEQ ID NO: 81415 - protein, 35 aa, Artificial Sequence; identical to SEQ ID NO: 7816
  GFR-binding peptide
  MOD_RES (33), (35): Xaa is C or S
  MOD_RES (14), (15), (16), (17), (18): Xaa is A or G
  MOD_RES (19), (20), (21), (22): Xaa is A or G or is absent

SEQ ID NO: 81416 - protein, 38 aa, Artificial Sequence; identical to SEQ ID NO: 7817
  GFR-binding peptide
  MOD_RES (2), (3), (35), (37): Xaa is C or S

SEQ ID NO: 81417 - protein, 32 aa, Artificial Sequence; identical to SEQ ID NO: 9635
  GFR-binding peptide
  MOD_RES (1), (32): Xaa is C or S

SEQ ID NO: 81418 - protein, 36 aa, Artificial Sequence; identical to SEQ ID NO: 7818
  GFR-binding peptide
  MOD_RES (33), (35): Xaa is C or S
  MOD_RES (14), (15), (16), (17), (18): Xaa is A or G
  MOD_RES (19), (20), (21), (22): Xaa is A or G or is absent

SEQ ID NO: 81419 - protein, 35 aa, Artificial Sequence; identical to SEQ ID NO: 7819
  GFR-binding peptide
  MOD_RES (2), (34): Xaa is C or S

SEQ ID NO: 81420 - protein, 36 aa, Artificial Sequence
  GFR-binding peptide
  MOD_RES (1), (35): Xaa is C or S
  MOD_RES (15), (16), (17), (18), (19): Xaa is A or G
  MOD_RES (20), (21), (22), (23): Xaa is A or G or is absent
XVPARLSAISILYLXXXXXXXXXLKNYQDMVVEAXG

SEQ ID NO: 81421 - protein, 33 aa, Artificial Sequence; identical to SEQ ID NO: 15132
  GFR-binding peptide
  MOD_RES (1), (33): Xaa is C or S

SEQ ID NO: 81422 - protein, 34 aa, Artificial Sequence; identical to SEQ ID NO: 9638
  GFR-binding peptide
  MOD_RES (1), (1): Xaa is C or S
  MOD_RES (15), (16), (17), (18), (19): Xaa is A or G
  MOD_RES (20), (21), (22), (23): Xaa is A or G or is absent

SEQ ID NO: 81423 - protein, 40 aa, Artificial Sequence; identical to SEQ ID NO: 9640
  GFR-binding peptide
  MOD_RES (4), (5), (39): Xaa is C or S
  MOD_RES (19), (20), (21), (22), (23): Xaa is A or G
  MOD_RES (24), (25), (26), (27): Xaa is A or G or is absent

SEQ ID NO: 81424 - protein, 36 aa, Artificial Sequence; identical to SEQ ID NO: 9641
  GFR-binding peptide
  MOD_RES (4), (5): Xaa is C or S

SEQ ID NO: 81425 - protein, 32 aa, Artificial Sequence; identical to SEQ ID NO: 7823
  GFR-binding peptide
  MOD_RES (31), (31): Xaa is C or S

SEQ ID NO: 81426 - protein, 34 aa, Artificial Sequence; identical to SEQ ID NO: 9643
  GFR-binding peptide
  MOD_RES (1), (1): Xaa is C or S
  MOD_RES (15), (16), (17), (18), (19): Xaa is A or G
  MOD_RES (20), (21), (22), (23): Xaa is A or G or is absent

SEQ ID NO: 81427 - protein, 33 aa, Artificial Sequence; identical to SEQ ID NO: 7824
  GFR-binding peptide
  MOD_RES (1), (1): Xaa is C or S
  MOD_RES (15), (16), (17), (18), (19): Xaa is A or G
  MOD_RES (20), (21), (22), (23): Xaa is A or G or is absent

SEQ ID NO: 81428 - protein, 39 aa, Artificial Sequence; identical to SEQ ID NO: 9646
  GFR-binding peptide
  MOD_RES (2), (3), (37), (39): Xaa is C or S
  MOD_RES (17), (18), (19), (20), (21): Xaa is A or G
  MOD_RES (22), (23), (24), (25): Xaa is A or G or is absent

SEQ ID NO: 81429 - protein, 38 aa, Artificial Sequence
  GFR-binding peptide
  MOD_RES (4), (5), (37): Xaa is C or S
SKAXXVPTKLSAISILYLDKGVVTYLKNYQGMAVSEXG

SEQ ID NO: 81430 - protein, 35 aa, Artificial Sequence; identical to SEQ ID NO: 7826
  GFR-binding peptide
  MOD_RES (3), (4): Xaa is C or S

SEQ ID NO: 81431 - protein, 40 aa, Artificial Sequence; identical to SEQ ID NO: 7829
  GFR-binding peptide
  MOD_RES (2), (3), (37), (39): Xaa is C or S
  MOD_RES (17), (18), (19), (20), (21): Xaa is A or G
  MOD_RES (22), (23), (24), (25): Xaa is A or G or is absent

SEQ ID NO: 81432 - protein, 41 aa, Artificial Sequence; identical to SEQ ID NO: 9649
  GFR-binding peptide
  MOD_RES (5), (6), (38), (40): Xaa is C or S

SEQ ID NO: 81433 - protein, 32 aa, Artificial Sequence; identical to SEQ ID NO: 9650
  GFR-binding peptide
  MOD_RES (31), (31): Xaa is C or S

SEQ ID NO: 81434 - protein, 42 aa, Artificial Sequence; identical to SEQ ID NO: 9652
  GFR-binding peptide
  MOD_RES (6), (7), (40), (42): Xaa is C or S
  MOD_RES (21), (22), (23), (24), (25): Xaa is A or G
  MOD_RES (26), (27), (28), (29): Xaa is A or G or is absent

SEQ ID NO: 81435 - protein, 35 aa, Artificial Sequence; identical to SEQ ID NO: 58074
  GFR-binding peptide
  MOD_RES (3), (4), (35): Xaa is C or S

SEQ ID NO: 81436 - protein, 37 aa, Artificial Sequence; identical to SEQ ID NO: 16930
  GFR-binding peptide
  MOD_RES (4), (5), (37): Xaa is C or S

SEQ ID NO: 81437 - protein, 39 aa, Artificial Sequence; identical to SEQ ID NO: 7832
  GFR-binding peptide
  MOD_RES (4), (5), (39): Xaa is C or S
  MOD_RES (19), (20), (21), (22), (23): Xaa is A or G
  MOD_RES (24), (25), (26), (27): Xaa is A or G or is absent

SEQ ID NO: 81438 - protein, 38 aa, Artificial Sequence; identical to SEQ ID NO: 7833
  GFR-binding peptide
  MOD_RES (35), (37): Xaa is C or S
  MOD_RES (14), (15), (16), (17), (18): Xaa is A or G
  MOD_RES (19), (20), (21), (22): Xaa is A or G or is absent

SEQ ID NO: 81439 - protein, 41 aa, Artificial Sequence; identical to SEQ ID NO: 9654
  GFR-binding peptide
  MOD_RES (4), (5), (39), (41): Xaa is C or S
  MOD_RES (19), (20), (21), (22), (23): Xaa is A or G
  MOD_RES (24), (25), (26), (27): Xaa is A or G or is absent

SEQ ID NO: 81440 - protein, 35 aa, Artificial Sequence
  GFR-binding peptide
  MOD_RES (2), (3), (34): Xaa is C or S
TXXAPVKTSAISMLYLDNGRVLLLKNYQMIVEEXG

SEQ ID NO: 81441 - protein, 41 aa, Artificial Sequence; identical to SEQ ID NO: 9655
  GFR-binding peptide
  MOD_RES (6), (7), (41): Xaa is C or S
  MOD_RES (21), (22), (23), (24), (25): Xaa is A or G
  MOD_RES (26), (27), (28), (29): Xaa is A or G or is absent

SEQ ID NO: 81442 - protein, 37 aa, Artificial Sequence; identical to SEQ ID NO: 9656
  GFR-binding peptide
  MOD_RES (1), (2), (34), (36): Xaa is C or S

SEQ ID NO: 81443 - protein, 32 aa, Artificial Sequence; identical to SEQ ID NO: 15144
  GFR-binding peptide
  MOD_RES (32), (32): Xaa is C or S

SEQ ID NO: 81444 - protein, 35 aa, Artificial Sequence
  GFR-binding peptide
  MOD_RES (1), (32), (34): Xaa is C or S
XAPVKTSAISMLYLDNGRVLLLKNYQMIVEEXGXL

SEQ ID NO: 81445 - protein, 44 aa, Artificial Sequence; identical to SEQ ID NO: 9659
  GFR-binding peptide
  MOD_RES (6), (7), (42), (44): Xaa is C or S
  MOD_RES (21), (22), (23), (24), (25): Xaa is A or G
  MOD_RES (26), (27), (28), (29): Xaa is A or G or is absent

SEQ ID NO: 81446 - protein, 33 aa, Artificial Sequence; identical to SEQ ID NO: 31061
  GFR-binding peptide
  MOD_RES (1), (2): Xaa is C or S

SEQ ID NO: 81447 - protein, 38 aa, Artificial Sequence; identical to SEQ ID NO: 29130
  GFR-binding peptide
  MOD_RES (2), (3), (37): Xaa is C or S
  MOD_RES (17), (18), (19), (20), (21): Xaa is A or G
  MOD_RES (22), (23), (24), (25): Xaa is A or G or is absent

SEQ ID NO: 81448 - protein, 36 aa, Artificial Sequence; identical to SEQ ID NO: 9661
  GFR-binding peptide
  MOD_RES (3), (4), (36): Xaa is C or S

SEQ ID NO: 81449 - protein, 37 aa, Artificial Sequence; identical to SEQ ID NO: 68517
  GFR-binding peptide
  MOD_RES (2), (3), (35), (37): Xaa is C or S

SEQ ID NO: 81450 - protein, 41 aa, Artificial Sequence; identical to SEQ ID NO: 29133
  GFR-binding peptide
  MOD_RES (5), (6), (40): Xaa is C or S
  MOD_RES (20), (21), (22), (23), (24): Xaa is A or G
  MOD_RES (25), (26), (27), (28): Xaa is A or G or is absent

SEQ ID NO: 81451 - protein, 41 aa, Artificial Sequence; identical to SEQ ID NO: 7838
  GFR-binding peptide
  MOD_RES (6), (7): Xaa is C or S
  MOD_RES (21), (22), (23), (24), (25): Xaa is A or G
  MOD_RES (26), (27), (28), (29): Xaa is A or G or is absent

SEQ ID NO: 81452 - protein, 39 aa, Artificial Sequence
  GFR-binding peptide
  MOD_RES (5), (6), (37), (39): Xaa is C or S
VPSTXXAPVKTSAISMLYLDNGRVLLLKNYQMIVEEXGX

SEQ ID NO: 81453 - protein, 35 aa, Artificial Sequence; identical to SEQ ID NO: 7839
  GFR-binding peptide
  MOD_RES (2), (3): Xaa is C or S
  MOD_RES (17), (18), (19), (20), (21): Xaa is A or G
  MOD_RES (22), (23), (24), (25): Xaa is A or G or is absent

SEQ ID NO: 81454 - protein, 39 aa, Artificial Sequence; identical to SEQ ID NO: 9665
  GFR-binding peptide
  MOD_RES (4), (5), (37), (39): Xaa is C or S

SEQ ID NO: 81455 - protein, 38 aa, Artificial Sequence; identical to SEQ ID NO: 7844
  GFR-binding peptide
  MOD_RES (4), (5): Xaa is C or S
  MOD_RES (19), (20), (21), (22), (23): Xaa is A or G
  MOD_RES (24), (25), (26), (27): Xaa is A or G or is absent

SEQ ID NO: 81456 - protein, 30 aa, Artificial Sequence; identical to SEQ ID NO: 7845
  GFR-binding peptide

SEQ ID NO: 81457 - protein, 38 aa, Artificial Sequence; identical to SEQ ID NO: 7846
  GFR-binding peptide
  MOD_RES (1), (2), (36), (38): Xaa is C or S
  MOD_RES (16), (17), (18), (19), (20): Xaa is A or G
  MOD_RES (21), (22), (23), (24): Xaa is A or G or is absent

SEQ ID NO: 81458 - protein, 36 aa, Artificial Sequence; identical to SEQ ID NO: 7847
  GFR-binding peptide
  MOD_RES (3), (4): Xaa is C or S
  MOD_RES (18), (19), (20), (21), (22): Xaa is A or G
  MOD_RES (23), (24), (25), (26): Xaa is A or G or is absent

SEQ ID NO: 81459 - protein, 43 aa, Artificial Sequence; identical to SEQ ID NO: 9667
  GFR-binding peptide
  MOD_RES (6), (7), (41), (43): Xaa is C or S
  MOD_RES (21), (22), (23), (24), (25): Xaa is A or G
  MOD_RES (26), (27), (28), (29): Xaa is A or G or is absent

SEQ ID NO: 81460 - protein, 43 aa, Artificial Sequence; identical to SEQ ID NO: 9668
  GFR-binding peptide
  MOD_RES (5), (6), (40), (42): Xaa is C or S
  MOD_RES (20), (21), (22), (23), (24): Xaa is A or G
  MOD_RES (25), (26), (27), (28): Xaa is A or G or is absent

SEQ ID NO: 81461 - protein, 35 aa, Artificial Sequence; identical to SEQ ID NO: 9669
  GFR-binding peptide
  MOD_RES (4), (5): Xaa is C or S

SEQ ID NO: 81462 - protein, 40 aa, Artificial Sequence; identical to SEQ ID NO: 7854
  GFR-binding peptide
  MOD_RES (6), (7), (38), (40): Xaa is C or S

SEQ ID NO: 81463 - protein, 38 aa, Artificial Sequence; identical to SEQ ID NO: 7855
  GFR-binding peptide
  MOD_RES (5), (6), (38): Xaa is C or S

SEQ ID NO: 81464 - protein, 34 aa, Artificial Sequence; identical to SEQ ID NO: 7856
  GFR-binding peptide
  MOD_RES (1), (34): Xaa is C or S
  MOD_RES (15), (16), (17), (18), (19): Xaa is A or G
  MOD_RES (20), (21), (22), (23): Xaa is A or G or is absent

SEQ ID NO: 81465 - protein, 38 aa, Artificial Sequence; identical to SEQ ID NO: 7857
  GFR-binding peptide
  MOD_RES (6), (7), (38): Xaa is C or S

SEQ ID NO: 81466 - protein, 37 aa, Artificial Sequence; identical to SEQ ID NO: 7858
  GFR-binding peptide
  MOD_RES (1), (36): Xaa is C or S
  MOD_RES (15), (16), (17), (18), (19): Xaa is A or G
  MOD_RES (20), (21), (22), (23): Xaa is A or G or is absent

SEQ ID NO: 81467 - protein, 36 aa, Artificial Sequence; identical to SEQ ID NO: 7859
  GFR-binding peptide
  MOD_RES (1), (2), (36): Xaa is C or S
  MOD_RES (16), (17), (18), (19), (20): Xaa is A or G
  MOD_RES (21), (22), (23), (24): Xaa is A or G or is absent

SEQ ID NO: 81468 - protein, 39 aa, Artificial Sequence; identical to SEQ ID NO: 7860
  GFR-binding peptide
  MOD_RES (5), (6), (37), (39): Xaa is C or S

SEQ ID NO: 81469 - protein, 38 aa, Artificial Sequence; identical to SEQ ID NO: 7861
  GFR-binding peptide
  MOD_RES (3), (4), (37): Xaa is C or S

SEQ ID NO: 81470 - protein, 39 aa, Artificial Sequence; identical to SEQ ID NO: 9676
  GFR-binding peptide
  MOD_RES (2), (3), (36), (38): Xaa is C or S
  MOD_RES (17), (18), (19), (20), (21): Xaa is A or G
  MOD_RES (22), (23), (24), (25): Xaa is A or G or is absent

SEQ ID NO: 81471 - protein, 35 aa, Artificial Sequence; identical to SEQ ID NO: 9679
  GFR-binding peptide
  MOD_RES (2), (3): Xaa is C or S
  MOD_RES (17), (18), (19), (20), (21): Xaa is A or G
  MOD_RES (22), (23), (24), (25): Xaa is A or G or is absent

SEQ ID NO: 81472 - protein, 36 aa, Artificial Sequence; identical to SEQ ID NO: 9680
  GFR-binding peptide
  MOD_RES (3), (3): Xaa is C or S
  MOD_RES (17), (18), (19), (20), (21): Xaa is A or G
  MOD_RES (22), (23), (24), (25): Xaa is A or G or is absent

SEQ ID NO: 81473 - protein, 34 aa, Artificial Sequence; identical to SEQ ID NO: 7863
  GFR-binding peptide
  MOD_RES (3), (4): Xaa is C or S

SEQ ID NO: 81474 - protein, 35 aa, Artificial Sequence
  GFR-binding peptide
  MOD_RES (4), (5): Xaa is C or S
SKAXXVPTKLSAISILYLDKGVVTYLKNYQGMAVS

SEQ ID NO: 81475 - protein, 42 aa, Artificial Sequence; identical to SEQ ID NO: 7865
  GFR-binding peptide
  MOD_RES (5), (6), (40), (42): Xaa is C or S
  MOD_RES (20), (21), (22), (23), (24): Xaa is A or G
  MOD_RES (25), (26), (27), (28): Xaa is A or G or is absent

SEQ ID NO: 81476 - protein, 41 aa, Artificial Sequence; identical to SEQ ID NO: 7866
  GFR-binding peptide
  MOD_RES (5), (6), (40): Xaa is C or S
  MOD_RES (20), (21), (22), (23), (24): Xaa is A or G
  MOD_RES (25), (26), (27), (28): Xaa is A or G or is absent

SEQ ID NO: 81477 - protein, 35 aa, Artificial Sequence; identical to SEQ ID NO: 7868
  GFR-binding peptide
  MOD_RES (2), (3): Xaa is C or S
  MOD_RES (17), (18), (19), (20), (21): Xaa is A or G
  MOD_RES (22), (23), (24), (25): Xaa is A or G or is absent

SEQ ID NO: 81478 - protein, 34 aa, Artificial Sequence
  GFR-binding peptide
  MOD_RES (34), (34): Xaa is C or S
  MOD_RES (14), (15), (16), (17), (18): Xaa is A or G
  MOD_RES (19), (20), (21), (22): Xaa is A or G or is absent
VPTKLSAISILYLXXXXXXXXXLKNYQGMAVSEX

SEQ ID NO: 81479 - protein, 36 aa, Artificial Sequence; identical to SEQ ID NO: 9683
  GFR-binding peptide
  MOD_RES (5), (6): Xaa is C or S

SEQ ID NO: 81480 - protein, 38 aa, Artificial Sequence; identical to SEQ ID NO: 16967
  GFR-binding peptide
  MOD_RES (1), (2), (36), (38): Xaa is C or S
  MOD_RES (16), (17), (18), (19), (20): Xaa is A or G
  MOD_RES (21), (22), (23), (24): Xaa is A or G or is absent

SEQ ID NO: 81481 - protein, 34 aa, Artificial Sequence; identical to SEQ ID NO: 9684
  GFR-binding peptide
  MOD_RES (1), (2), (33): Xaa is C or S

SEQ ID NO: 81482 - protein, 36 aa, Artificial Sequence; identical to SEQ ID NO: 7874
  GFR-binding peptide
  MOD_RES (1), (2), (33), (35): Xaa is C or S

SEQ ID NO: 81483 - protein, 36 aa, Artificial Sequence; identical to SEQ ID NO: 7875
  GFR-binding peptide
  MOD_RES (3), (4), (36): Xaa is C or S

SEQ ID NO: 81484 - protein, 36 aa, Artificial Sequence
  GFR-binding peptide
  MOD_RES (34), (36): Xaa is C or S
  MOD_RES (14), (15), (16), (17), (18): Xaa is A or G
  MOD_RES (19), (20), (21), (22): Xaa is A or G or is absent
TPTKMSAISMLYLXXXXXXXXXLKNYQGMVVDRXGX

SEQ ID NO: 81485 - protein, 40 aa, Artificial Sequence; identical to SEQ ID NO: 9686
  GFR-binding peptide
  MOD_RES (5), (37), (39): Xaa is C or S

SEQ ID NO: 81486 - protein, 36 aa, Artificial Sequence; identical to SEQ ID NO: 7877
  GFR-binding peptide
  MOD_RES (5), (6): Xaa is C or S

SEQ ID NO: 81487 - protein, 41 aa, Artificial Sequence
  GFR-binding peptide
  MOD_RES (6), (7), (39), (41): Xaa is C or S
KASKAXXVPTKLSAISILYLDKGVVTYLKNYQGMAVSEXGX

SEQ ID NO: 81488 - protein, 40 aa, Artificial Sequence
  GFR-binding peptide
  MOD_RES (4), (5), (39): Xaa is C or S
  MOD_RES (19), (20), (21), (22), (23): Xaa is A or G
  MOD_RES (24), (25), (26), (27): Xaa is A or G or is absent
AGPXXTPTKMSAISMLYLXXXXXXXXXLKNYQGMVVDRXG

SEQ ID NO: 81489 - protein, 40 aa, Artificial Sequence; identical to SEQ ID NO: 7878
  GFR-binding peptide
  MOD_RES (1), (2), (37), (39): Xaa is C or S
  MOD_RES (16), (17), (18), (19), (20): Xaa is A or G
  MOD_RES (21), (22), (23), (24): Xaa is A or G or is absent

SEQ ID NO: 81490 - protein, 36 aa, Artificial Sequence
  GFR-binding peptide
  MOD_RES (5), (6): Xaa is C or S
IPEPXXVPEKMSAISILYLDENKNVVLKNYQNMTVE

SEQ ID NO: 81491 - protein, 35 aa, Artificial Sequence; identical to SEQ ID NO: 7881
  GFR-binding peptide
  MOD_RES (4), (5): Xaa is C or S

SEQ ID NO: 81492 - protein, 37 aa, Artificial Sequence; identical to SEQ ID NO: 9688
  GFR-binding peptide
  MOD_RES (6), (7): Xaa is C or S

SEQ ID NO: 81493 - protein, 41 aa, Artificial Sequence; identical to SEQ ID NO: 9689
  GFR-binding peptide
  MOD_RES (6), (7), (40): Xaa is C or S
  MOD_RES (21), (22), (23), (24), (25): Xaa is A or G
  MOD_RES (26), (27), (28), (29): Xaa is A or G or is absent

SEQ ID NO: 81494 - protein, 37 aa, Artificial Sequence; identical to SEQ ID NO: 7884
  GFR-binding peptide
  MOD_RES (5), (6), (37): Xaa is C or S

SEQ ID NO: 81495 - protein, 39 aa, Artificial Sequence; identical to SEQ ID NO: 7886
  GFR-binding peptide
  MOD_RES (2), (3), (36), (38): Xaa is C or S

SEQ ID NO: 81496 - protein, 39 aa, Artificial Sequence
  GFR-binding peptide
  MOD_RES (6), (7), (39): Xaa is C or S
KASKAXXVPTKLSAISILYLDKGVVTYLKNYQGMAVSEX

SEQ ID NO: 81497 - protein, 33 aa, Artificial Sequence
  GFR-binding peptide
  MOD_RES (1), (33): Xaa is C or S
XVPTKLSAISILYLDKGVVTYLKNYQGMAVSEX

SEQ ID NO: 81498 - protein, 37 aa, Artificial Sequence; identical to SEQ ID NO: 7888
  GFR-binding peptide
  MOD_RES (4), (5), (37): Xaa is C or S

SEQ ID NO: 81499 - protein, 37 aa, Artificial Sequence; identical to SEQ ID NO: 9690
  GFR-binding peptide
  MOD_RES (4), (5): Xaa is C or S
  MOD_RES (19), (20), (21), (22), (23): Xaa is A or G
  MOD_RES (24), (25), (26), (27): Xaa is A or G or is absent

SEQ ID NO: 81500 - protein, 41 aa, Artificial Sequence; identical to SEQ ID NO: 7889
  GFR-binding peptide
  MOD_RES (4), (5), (38), (40): Xaa is C or S
  MOD_RES (19), (20), (21), (22), (23): Xaa is A or G
  MOD_RES (24), (25), (26), (27): Xaa is A or G or is absent

SEQ ID NO: 81501 - protein, 37 aa, Artificial Sequence; identical to SEQ ID NO: 66794
  GFR-binding peptide
  MOD_RES (6), (7): Xaa is C or S

SEQ ID NO: 81502 - protein, 36 aa, Artificial Sequence
  GFR-binding peptide
  MOD_RES (1), (2), (34), (36): Xaa is C or S
XXVPTKLSAISILYLDKGVVTYLKNYQGMAVSEXGX

SEQ ID NO: 81503 - protein, 37 aa, Artificial Sequence
  GFR-binding peptide
  MOD_RES (1), (2), (36): Xaa is C or S
  MOD_RES (16), (17), (18), (19), (20): Xaa is A or G
  MOD_RES (21), (22), (23), (24): Xaa is A or G or is absent
XXVPTKLSAISILYLXXXXXXXXXLKNYQGMAVSEXG

SEQ ID NO: 81504 - protein, 37 aa, Artificial Sequence; identical to SEQ ID NO: 7890
  GFR-binding peptide
  MOD_RES (1), (2), (36): Xaa is C or S
  MOD_RES (16), (17), (18), (19), (20): Xaa is A or G
  MOD_RES (21), (22), (23), (24): Xaa is A or G or is absent

SEQ ID NO: 81505 - protein, 35 aa, Artificial Sequence; identical to SEQ ID NO: 9691
  GFR-binding peptide
  MOD_RES (1), (2), (35): Xaa is C or S
  MOD_RES (16), (17), (18), (19), (20): Xaa is A or G
  MOD_RES (21), (22), (23), (24): Xaa is A or G or is absent

SEQ ID NO: 81506 - protein, 35 aa, Artificial Sequence
  GFR-binding peptide
  MOD_RES (2), (3): Xaa is C or S
  MOD_RES (17), (18), (19), (20), (21): Xaa is A or G
  MOD_RES (22), (23), (24), (25): Xaa is A or G or is absent
PXXVPEKMSAISILYLXXXXXXXXXLKNYQNMTVE

SEQ ID NO: 81507 - protein, 42 aa, Artificial Sequence; identical to SEQ ID NO: 9692
  GFR-binding peptide
  MOD_RES (6), (7), (40), (42): Xaa is C or S

SEQ ID NO: 81508 - protein, 40 aa, Artificial Sequence; identical to SEQ ID NO: 7894
  GFR-binding peptide
  MOD_RES (3), (4), (39): Xaa is C or S
  MOD_RES (18), (19), (20), (21), (22): Xaa is A or G
  MOD_RES (23), (24), (25), (26): Xaa is A or G or is absent

SEQ ID NO: 81509 - protein, 35 aa, Artificial Sequence; identical to SEQ ID NO: 29172
  GFR-binding peptide
  MOD_RES (34), (34): Xaa is C or S
  MOD_RES (14), (15), (16), (17), (18): Xaa is A or G
  MOD_RES (19), (20), (21), (22): Xaa is A or G or is absent

SEQ ID NO: 81510 - protein, 40 aa, Artificial Sequence; identical to SEQ ID NO: 7898
  GFR-binding peptide
  MOD_RES (6), (7), (40): Xaa is C or S
  MOD_RES (21), (22), (23), (24), (25): Xaa is A or G
  MOD_RES (26), (27), (28), (29): Xaa is A or G or is absent

SEQ ID NO: 81511 - protein, 34 aa, Artificial Sequence; identical to SEQ ID NO: 7901
  GFR-binding peptide
  MOD_RES (34), (34): Xaa is C or S
  MOD_RES (14), (15), (16), (17), (18): Xaa is A or G
  MOD_RES (19), (20), (21), (22): Xaa is A or G or is absent

SEQ ID NO: 81512 - protein, 30 aa, Artificial Sequence; identical to SEQ ID NO: 9695
  GFR-binding peptide

SEQ ID NO: 81513 - protein, 32 aa, Artificial Sequence; identical to SEQ ID NO: 66807
  GFR-binding peptide
  MOD_RES (14), (15), (16), (17), (18): Xaa is A or G
  MOD_RES (19), (20), (21), (22): Xaa is A or G or is absent

SEQ ID NO: 81514 - protein, 37 aa, Artificial Sequence; identical to SEQ ID NO: 16987
  GFR-binding peptide
  MOD_RES (5), (6): Xaa is C or S

SEQ ID NO: 81515 - protein, 42 aa, Artificial Sequence; identical to SEQ ID NO: 9697
  GFR-binding peptide
  MOD_RES (5), (6), (39), (41): Xaa is C or S

SEQ ID NO: 81516 - protein, 37 aa, Artificial Sequence; identical to SEQ ID NO: 7903
  GFR-binding peptide
  MOD_RES (1), (2), (34), (36): Xaa is C or S

SEQ ID NO: 81517 - protein, 44 aa, Artificial Sequence; identical to SEQ ID NO: 9699
  GFR-binding peptide
  MOD_RES (6), (7), (41), (43): Xaa is C or S
  MOD_RES (21), (22), (23), (24), (25): Xaa is A or G
  MOD_RES (26), (27), (28), (29): Xaa is A or G or is absent

SEQ ID NO: 81518 - protein, 38 aa, Artificial Sequence; identical to SEQ ID NO: 66808
  GFR-binding peptide
  MOD_RES (2), (3), (37): Xaa is C or S
  MOD_RES (17), (18), (19), (20), (21): Xaa is A or G
  MOD_RES (22), (23), (24), (25): Xaa is A or G or is absent

SEQ ID NO: 81519 - protein, 37 aa, Artificial Sequence; identical to SEQ ID NO: 9702
  GFR-binding peptide
  MOD_RES (4), (5): Xaa is C or S
  MOD_RES (19), (20), (21), (22), (23): Xaa is A or G
  MOD_RES (24), (25), (26), (27): Xaa is A or G or is absent

SEQ ID NO: 81520 - protein, 38 aa, Artificial Sequence; identical to SEQ ID NO: 31114
  GFR-binding peptide
  MOD_RES (2), (3), (35), (37): Xaa is C or S

SEQ ID NO: 81521 - protein, 35 aa, Artificial Sequence
  GFR-binding peptide
  MOD_RES (1), (34): Xaa is C or S
  MOD_RES (15), (16), (17), (18), (19): Xaa is A or G
  MOD_RES (20), (21), (22), (23): Xaa is A or G or is absent
XAPVKTSAISMLYLXXXXXXXXXLKNYQMIVEEXG

SEQ ID NO: 81522 - protein, 40 aa, Artificial Sequence; identical to SEQ ID NO: 7904
  GFR-binding peptide
  MOD_RES (6), (7), (40): Xaa is C or S
  MOD_RES (21), (22), (23), (24), (25): Xaa is A or G
  MOD_RES (26), (27), (28), (29): Xaa is A or G or is absent

SEQ ID NO: 81523 - protein, 35 aa, Artificial Sequence; identical to SEQ ID NO: 7905
  GFR-binding peptide
  MOD_RES (1), (33), (35): Xaa is C or S

SEQ ID NO: 81524 - protein, 38 aa, Artificial Sequence; identical to SEQ ID NO: 9704
  GFR-binding peptide
  MOD_RES (2), (3), (38): Xaa is C or S
  MOD_RES (17), (18), (19), (20), (21): Xaa is A or G
  MOD_RES (22), (23), (24), (25): Xaa is A or G or is absent

SEQ ID NO: 81525 - protein, 40 aa, Artificial Sequence
  GFR-binding peptide
  MOD_RES (4), (5), (37), (39): Xaa is C or S
SKAXXVPTKLSAISILYLDKGVVTYLKNYQGMAVSEXGXR

SEQ ID NO: 81526 - protein, 38 aa, Artificial Sequence
  GFR-binding peptide
  MOD_RES (6), (7): Xaa is C or S
GIPEPXXVPEKMSAISILYLDENKNVVLKNYQNMTVES

SEQ ID NO: 81527 - protein, 33 aa, Artificial Sequence; identical to SEQ ID NO: 9706
  GFR-binding peptide
  MOD_RES (31), (33): Xaa is C or S

SEQ ID NO: 81528 - protein, 39 aa, Artificial Sequence; identical to SEQ ID NO: 9708
  GFR-binding peptide
  MOD_RES (6), (7): Xaa is C or S
  MOD_RES (21), (22), (23), (24), (25): Xaa is A or G
  MOD_RES (26), (27), (28), (29): Xaa is A or G or is absent

SEQ ID NO: 81529 - protein, 40 aa, Artificial Sequence; identical to SEQ ID NO: 9709
  GFR-binding peptide
  MOD_RES (5), (6), (39): Xaa is C or S
  MOD_RES (20), (21), (22), (23), (24): Xaa is A or G
  MOD_RES (25), (26), (27), (28): Xaa is A or G or is absent

SEQ ID NO: 81530 - protein, 36 aa, Artificial Sequence; identical to SEQ ID NO: 7909
  GFR-binding peptide
  MOD_RES (5), (6): Xaa is C or S

SEQ ID NO: 81531 - protein, 37 aa, Artificial Sequence; identical to SEQ ID NO: 16999
  GFR-binding peptide
  MOD_RES (1), (35), (37): Xaa is C or S
  MOD_RES (15), (16), (17), (18), (19): Xaa is A or G
  MOD_RES (20), (21), (22), (23): Xaa is A or G or is absent

SEQ ID NO: 81532 - protein, 39 aa, Artificial Sequence; identical to SEQ ID NO: 7911
  GFR-binding peptide
  MOD_RES (4), (36), (38): Xaa is C or S

SEQ ID NO: 81533 - protein, 38 aa, Artificial Sequence; identical to SEQ ID NO: 7912
  GFR-binding peptide
  MOD_RES (2), (3), (37): Xaa is C or S
  MOD_RES (17), (18), (19), (20), (21): Xaa is A or G
  MOD_RES (22), (23), (24), (25): Xaa is A or G or is absent

SEQ ID NO: 81534 - protein, 34 aa, Artificial Sequence; identical to SEQ ID NO: 15206
  GFR-binding peptide
  MOD_RES (2), (3): Xaa is C or S

SEQ ID NO: 81535 - protein, 35 aa, Artificial Sequence; identical to SEQ ID NO: 9713
  GFR-binding peptide
  MOD_RES (4), (5): Xaa is C or S

SEQ ID NO: 81536 - protein, 37 aa, Artificial Sequence; identical to SEQ ID NO: 9716
  GFR-binding peptide
  MOD_RES (2), (3): Xaa is C or S
  MOD_RES (17), (18), (19), (20), (21): Xaa is A or G
  MOD_RES (22), (23), (24), (25): Xaa is A or G or is absent

SEQ ID NO: 81537 - protein, 39 aa, Artificial Sequence; identical to SEQ ID NO: 7920
  GFR-binding peptide
  MOD_RES (1), (2), (36), (38): Xaa is C or S
  MOD_RES (16), (17), (18), (19), (20): Xaa is A or G
  MOD_RES (21), (22), (23), (24): Xaa is A or G or is absent

SEQ ID NO: 81538 - protein, 34 aa, Artificial Sequence; identical to SEQ ID NO: 9718
  GFR-binding peptide
  MOD_RES (2), (3): Xaa is C or S

SEQ ID NO: 81539 - protein, 35 aa, Artificial Sequence; identical to SEQ ID NO: 7921
  GFR-binding peptide
  MOD_RES (34), (34): Xaa is C or S
  MOD_RES (14), (15), (16), (17), (18): Xaa is A or G
  MOD_RES (19), (20), (21), (22): Xaa is A or G or is absent

SEQ ID NO: 81540 - protein, 34 aa, Artificial Sequence; identical to SEQ ID NO: 7922
  GFR-binding peptide
  MOD_RES (1), (2): Xaa is C or S

SEQ ID NO: 81541 - protein, 33 aa, Artificial Sequence; identical to SEQ ID NO: 31134
  GFR-binding peptide
  MOD_RES (2), (3): Xaa is C or S

SEQ ID NO: 81542 - protein, 35 aa, Artificial Sequence; identical to SEQ ID NO: 9720
  GFR-binding peptide
  MOD_RES (1), (34): Xaa is C or S
  MOD_RES (15), (16), (17), (18), (19): Xaa is A or G
  MOD_RES (20), (21), (22), (23): Xaa is A or G or is absent

SEQ ID NO: 81543 - protein, 37 aa, Artificial Sequence; identical to SEQ ID NO: 9721
  GFR-binding peptide
  MOD_RES (4), (5), (37): Xaa is C or S

SEQ ID NO: 81544 - protein, 35 aa, Artificial Sequence; identical to SEQ ID NO: 7923
  GFR-binding peptide
  MOD_RES (3), (4): Xaa is C or S

SEQ ID NO: 81545 - protein, 34 aa, Artificial Sequence; identical to SEQ ID NO: 9724
  GFR-binding peptide
  MOD_RES (1), (2): Xaa is C or S
  MOD_RES (16), (17), (18), (19), (20): Xaa is A or G
  MOD_RES (21), (22), (23), (24): Xaa is A or G or is absent

SEQ ID NO: 81546 - protein, 38 aa, Artificial Sequence; identical to SEQ ID NO: 7925
  GFR-binding peptide
  MOD_RES (1), (35), (37): Xaa is C or S
  MOD_RES (15), (16), (17), (18), (19): Xaa is A or G
  MOD_RES (20), (21), (22), (23): Xaa is A or G or is absent

SEQ ID NO: 81547 - protein, 35 aa, Artificial Sequence; identical to SEQ ID NO: 7926
  GFR-binding peptide
  MOD_RES (1), (35): Xaa is C or S
  MOD_RES (15), (16), (17), (18), (19): Xaa is A or G
  MOD_RES (20), (21), (22), (23): Xaa is A or G or is absent

SEQ ID NO: 81548 - protein, 38 aa, Artificial Sequence; identical to SEQ ID NO: 7928
  GFR-binding peptide
  MOD_RES (2), (36), (38): Xaa is C or S
  MOD_RES (16), (17), (18), (19), (20): Xaa is A or G
  MOD_RES (21), (22), (23), (24): Xaa is A or G or is absent

SEQ ID NO: 81549 - protein, 38 aa, Artificial Sequence; identical to SEQ ID NO: 7932
  GFR-binding peptide
  MOD_RES (3), (4), (35), (37): Xaa is C or S

SEQ ID NO: 81550 - protein, 30 aa, Artificial Sequence; identical to SEQ ID NO: 9729
  GFR-binding peptide

SEQ ID NO: 81551 - protein, 40 aa, Artificial Sequence; identical to SEQ ID NO: 9731
  GFR-binding peptide
  MOD_RES (6), (7), (39): Xaa is C or S

SEQ ID NO: 81552 - protein, 37 aa, Artificial Sequence; identical to SEQ ID NO: 9733
  GFR-binding peptide
  MOD_RES (3), (4), (35), (37): Xaa is C or S

SEQ ID NO: 81553 - protein, 34 aa, Artificial Sequence
  GFR-binding peptide
  MOD_RES (32), (34): Xaa is C or S
VPEKMSAISILYLDENKNVVLKNYQNMTVESXAX

SEQ ID NO: 81554 - protein, 40 aa, Artificial Sequence; identical to SEQ ID NO: 9735
  GFR-binding peptide
  MOD_RES (5), (6), (40): Xaa is C or S
  MOD_RES (20), (21), (22), (23), (24): Xaa is A or G
  MOD_RES (25), (26), (27), (28): Xaa is A or G or is absent

SEQ ID NO: 81555 - protein, 37 aa, Artificial Sequence; identical to SEQ ID NO: 9738
  GFR-binding peptide
  MOD_RES (4), (5), (37): Xaa is C or S

SEQ ID NO: 81556 - protein, 38 aa, Artificial Sequence; identical to SEQ ID NO: 7934
  GFR-binding peptide
  MOD_RES (6), (7), (38): Xaa is C or S

SEQ ID NO: 81557 - protein, 37 aa, Artificial Sequence
  GFR-binding peptide
  MOD_RES (2), (3), (35), (37): Xaa is C or S
AXXVPTKLSAISILYLDKGVVTYLKNYQGMAVSEXGX

SEQ ID NO: 81558 - protein, 33 aa, Artificial Sequence; identical to SEQ ID NO: 15228
  GFR-binding peptide
  MOD_RES (32), (32): Xaa is C or S

SEQ ID NO: 81559 - protein, 34 aa, Artificial Sequence; identical to SEQ ID NO: 7937
  GFR-binding peptide
  MOD_RES (2), (3): Xaa is C or S

SEQ ID NO: 81560 - protein, 34 aa, Artificial Sequence; identical to SEQ ID NO: 68586
  GFR-binding peptide
  MOD_RES (34), (34): Xaa is C or S
  MOD_RES (14), (15), (16), (17), (18): Xaa is A or G
  MOD_RES (19), (20), (21), (22): Xaa is A or G or is absent

SEQ ID NO: 81561 - protein, 40 aa, Artificial Sequence; identical to SEQ ID NO: 9741
  GFR-binding peptide
  MOD_RES (4), (5), (38), (40): Xaa is C or S
  MOD_RES (19), (20), (21), (22), (23): Xaa is A or G
  MOD_RES (24), (25), (26), (27): Xaa is A or G or is absent

SEQ ID NO: 81562 - protein, 37 aa, Artificial Sequence; identical to SEQ ID NO: 9745
  GFR-binding peptide
  MOD_RES (34), (36): Xaa is C or S
  MOD_RES (14), (15), (16), (17), (18): Xaa is A or G
  MOD_RES (19), (20), (21), (22): Xaa is A or G or is absent

SEQ ID NO: 81563 - protein, 40 aa, Artificial Sequence; identical to SEQ ID NO: 9748
  GFR-binding peptide
  MOD_RES (4), (5), (39): Xaa is C or S
  MOD_RES (19), (20), (21), (22), (23): Xaa is A or G
  MOD_RES (24), (25), (26), (27): Xaa is A or G or is absent

SEQ ID NO: 81564 - protein, 35 aa, Artificial Sequence
  GFR-binding peptide
  MOD_RES (1), (2), (34): Xaa is C or S
XXVPTKLSAISILYLDKGVVTYLKNYQGMAVSEXG

SEQ ID NO: 81565 - protein, 33 aa, Artificial Sequence; identical to SEQ ID NO: 66844
  GFR-binding peptide
  MOD_RES (2), (3): Xaa is C or S

SEQ ID NO: 81566 - protein, 36 aa, Artificial Sequence; identical to SEQ ID NO: 7945
  GFR-binding peptide
  MOD_RES (1), (2): Xaa is C or S
  MOD_RES (16), (17), (18), (19), (20): Xaa is A or G
  MOD_RES (21), (22), (23), (24): Xaa is A or G or is absent

SEQ ID NO: 81567 - protein, 40 aa, Artificial Sequence; identical to SEQ ID NO: 9752
  GFR-binding peptide
  MOD_RES (6), (7), (39): Xaa is C or S

SEQ ID NO: 81568 - protein, 36 aa, Artificial Sequence; identical to SEQ ID NO: 9753
  GFR-binding peptide
  MOD_RES (1), (34), (36): Xaa is C or S

SEQ ID NO: 81569 - protein, 40 aa, Artificial Sequence; identical to SEQ ID NO: 31170
  GFR-binding peptide
  MOD_RES (4), (5), (37), (39): Xaa is C or S

SEQ ID NO: 81570 - protein, 35 aa, Artificial Sequence; identical to SEQ ID NO: 9754
  GFR-binding peptide
  MOD_RES (1), (2), (34): Xaa is C or S

SEQ ID NO: 81571 - protein, 39 aa, Artificial Sequence; identical to SEQ ID NO: 9755
  GFR-binding peptide
  MOD_RES (3), (4), (36), (38): Xaa is C or S

SEQ ID NO: 81572 - protein, 38 aa, Artificial Sequence; identical to SEQ ID NO: 9756
  GFR-binding peptide
  MOD_RES (1), (35), (37): Xaa is C or S
  MOD_RES (15), (16), (17), (18), (19): Xaa is A or G
  MOD_RES (20), (21), (22), (23): Xaa is A or G or is absent

SEQ ID NO: 81573 - protein, 35 aa, Artificial Sequence
  GFR-binding peptide
  MOD_RES (1), (33), (35): Xaa is C or S
XTPTKMSAISMLYLNDKQQIILKNYQGMVVDRXGX

SEQ ID NO: 81574 - protein, 41 aa, Artificial Sequence; identical to SEQ ID NO: 7948
  GFR-binding peptide
  MOD_RES (6), (7), (38), (40): Xaa is C or S

SEQ ID NO: 81575 - protein, 38 aa, Artificial Sequence
  GFR-binding peptide
  MOD_RES (1), (35), (37): Xaa is C or S
  MOD_RES (15), (16), (17), (18), (19): Xaa is A or G
  MOD_RES (20), (21), (22), (23): Xaa is A or G or is absent
XTPTKMSAISMLYLXXXXXXXXXLKNYQGMVVDRXGXS

SEQ ID NO: 81576 - protein, 32 aa, Artificial Sequence; identical to SEQ ID NO: 7949
  GFR-binding peptide
  MOD_RES (14), (15), (16), (17), (18): Xaa is A or G
  MOD_RES (19), (20), (21), (22): Xaa is A or G or is absent

SEQ ID NO: 81577 - protein, 33 aa, Artificial Sequence; identical to SEQ ID NO: 58178
  GFR-binding peptide
  MOD_RES (1), (2), (33): Xaa is C or S

SEQ ID NO: 81578 - protein, 39 aa, Artificial Sequence; identical to SEQ ID NO: 31178
  GFR-binding peptide
  MOD_RES (1), (2), (36), (38): Xaa is C or S
  MOD_RES (16), (17), (18), (19), (20): Xaa is A or G
  MOD_RES (21), (22), (23), (24): Xaa is A or G or is absent

SEQ ID NO: 81579 - protein, 37 aa, Artificial Sequence; identical to SEQ ID NO: 7952
  GFR-binding peptide
  MOD_RES (1), (35), (37): Xaa is C or S
  MOD_RES (15), (16), (17), (18), (19): Xaa is A or G
  MOD_RES (20), (21), (22), (23): Xaa is A or G or is absent

SEQ ID NO: 81580 - protein, 38 aa, Artificial Sequence; identical to SEQ ID NO: 7954
  GFR-binding peptide
  MOD_RES (2), (3), (37): Xaa is C or S
  MOD_RES (17), (18), (19), (20), (21): Xaa is A or G
  MOD_RES (22), (23), (24), (25): Xaa is A or G or is absent

SEQ ID NO: 81581 - protein, 32 aa, Artificial Sequence; identical to SEQ ID NO: 9758
  GFR-binding peptide
  MOD_RES (1), (1): Xaa is C or S

SEQ ID NO: 81582 - protein, 34 aa, Artificial Sequence; identical to SEQ ID NO: 31179
  GFR-binding peptide
  MOD_RES (32), (34): Xaa is C or S

SEQ ID NO: 81583 - protein, 41 aa, Artificial Sequence; identical to SEQ ID NO: 17035
  GFR-binding peptide
  MOD_RES (5), (6), (40): Xaa is C or S
  MOD_RES (20), (21), (22), (23), (24): Xaa is A or G
  MOD_RES (25), (26), (27), (28): Xaa is A or G or is absent

SEQ ID NO: 81584 - protein, 39 aa, Artificial Sequence; identical to SEQ ID NO: 15243
  GFR-binding peptide
  MOD_RES (2), (3), (37), (39): Xaa is C or S
  MOD_RES (17), (18), (19), (20), (21): Xaa is A or G
  MOD_RES (22), (23), (24), (25): Xaa is A or G or is absent

SEQ ID NO: 81585 - protein, 38 aa, Artificial Sequence
  GFR-binding peptide
  MOD_RES (6), (7): Xaa is C or S
GSAGPXXTPTKMSAISMLYLNDKQQIILKNYQGMVVDR

SEQ ID NO: 81586 - protein, 41 aa, Artificial Sequence; identical to SEQ ID NO: 70283
  GFR-binding peptide
  MOD_RES (4), (5), (39), (41): Xaa is C or S
  MOD_RES (19), (20), (21), (22), (23): Xaa is A or G
  MOD_RES (24), (25), (26), (27): Xaa is A or G or is absent

SEQ ID NO: 81587 - protein, 32 aa, Artificial Sequence; identical to SEQ ID NO: 68609
  GFR-binding peptide
  MOD_RES (1), (2): Xaa is C or S

SEQ ID NO: 81588 - protein, 35 aa, Artificial Sequence; identical to SEQ ID NO: 15246
  GFR-binding peptide
  MOD_RES (1), (33), (35): Xaa is C or S

SEQ ID NO: 81589 - protein, 33 aa, Artificial Sequence; identical to SEQ ID NO: 7958
  GFR-binding peptide
  MOD_RES (1), (1): Xaa is C or S
  MOD_RES (15), (16), (17), (18), (19): Xaa is A or G
  MOD_RES (20), (21), (22), (23): Xaa is A or G or is absent

SEQ ID NO: 81590 - protein, 35 aa, Artificial Sequence
  GFR-binding peptide
  MOD_RES (1), (2), (34): Xaa is C or S
XXVPARLSAISILYLDAANNVVLKNYQDMVVEAXG

SEQ ID NO: 81591 - protein, 35 aa, Artificial Sequence; identical to SEQ ID NO: 7961
  GFR-binding peptide
  MOD_RES (34), (34): Xaa is C or S
  MOD_RES (14), (15), (16), (17), (18): Xaa is A or G
  MOD_RES (19), (20), (21), (22): Xaa is A or G or is absent

SEQ ID NO: 81592 - protein, 37 aa, Artificial Sequence; identical to SEQ ID NO: 7962
  GFR-binding peptide
  MOD_RES (2), (3), (37): Xaa is C or S
  MOD_RES (17), (18), (19), (20), (21): Xaa is A or G
  MOD_RES (22), (23), (24), (25): Xaa is A or G or is absent

SEQ ID NO: 81593 - protein, 37 aa, Artificial Sequence; identical to SEQ ID NO: 9764
  GFR-binding peptide
  MOD_RES (3), (4), (35), (37): Xaa is C or S

SEQ ID NO: 81594 - protein, 38 aa, Artificial Sequence; identical to SEQ ID NO: 9766
  GFR-binding peptide
  MOD_RES (1), (36), (38): Xaa is C or S
  MOD_RES (15), (16), (17), (18), (19): Xaa is A or G
  MOD_RES (20), (21), (22), (23): Xaa is A or G or is absent

SEQ ID NO: 81595 - protein, 35 aa, Artificial Sequence
  GFR-binding peptide
  MOD_RES (32), (34): Xaa is C or S
VPTKLSAISILYLDKGVVTYLKNYQGMAVSEXGXR

SEQ ID NO: 81596 - protein, 39 aa, Artificial Sequence; identical to SEQ ID NO: 9769
  GFR-binding peptide
  MOD_RES (3), (4), (38): Xaa is C or S
  MOD_RES (18), (19), (20), (21), (22): Xaa is A or G
  MOD_RES (23), (24), (25), (26): Xaa is A or G or is absent

SEQ ID NO: 81597 - protein, 32 aa, Artificial Sequence; identical to SEQ ID NO: 7966
  GFR-binding peptide
  MOD_RES (1), (32): Xaa is C or S

SEQ ID NO: 81598 - protein, 35 aa, Artificial Sequence; identical to SEQ ID NO: 68612
  GFR-binding peptide
  MOD_RES (1), (35): Xaa is C or S
  MOD_RES (15), (16), (17), (18), (19): Xaa is A or G
  MOD_RES (20), (21), (22), (23): Xaa is A or G or is absent

SEQ ID NO: 81599 - protein, 35 aa, Artificial Sequence; identical to SEQ ID NO: 9770
  GFR-binding peptide
  MOD_RES (1), (32), (34): Xaa is C or S

SEQ ID NO: 81600 - protein, 31 aa, Artificial Sequence; identical to SEQ ID NO: 7967
  GFR-binding peptide
  MOD_RES (31), (31): Xaa is C or S

SEQ ID NO: 81601 - protein, 37 aa, Artificial Sequence; identical to SEQ ID NO: 7969
  GFR-binding peptide
  MOD_RES (1), (2), (36): Xaa is C or S
  MOD_RES (16), (17), (18), (19), (20): Xaa is A or G
  MOD_RES (21), (22), (23), (24): Xaa is A or G or is absent

SEQ ID NO: 81602 - protein, 33 aa, Artificial Sequence; identical to SEQ ID NO: 9775
  GFR-binding peptide
  MOD_RES (2), (3): Xaa is C or S

SEQ ID NO: 81603 - protein, 40 aa, Artificial Sequence; identical to SEQ ID NO: 7972
  GFR-binding peptide
  MOD_RES (6), (7), (38), (40): Xaa is C or S

SEQ ID NO: 81604 - protein, 33 aa, Artificial Sequence; identical to SEQ ID NO: 9776
  GFR-binding peptide
  MOD_RES (1), (32): Xaa is C or S

SEQ ID NO: 81605 - protein, 42 aa, Artificial Sequence; identical to SEQ ID NO: 17047
  GFR-binding peptide
  MOD_RES (2), (36): Xaa is C or S
  MOD_RES (14), (15), (16), (17), (18): Xaa is A or G
  MOD_RES (19), (20), (21), (22): Xaa is A or G or is absent

SEQ ID NO: 81606 - protein, 34 aa, Artificial Sequence; identical to SEQ ID NO: 17846
  GFR-binding peptide
  MOD_RES (13), (14), (15), (16), (17): Xaa is A or G
  MOD_RES (18), (19), (20), (21): Xaa is A or G or is absent

SEQ ID NO: 81607 - protein, 41 aa, Artificial Sequence; identical to SEQ ID NO: 50102
  GFR-binding peptide
  MOD_RES (2), (4), (35), (36): Xaa is C or S

SEQ ID NO: 81608 - protein, 36 aa, Artificial Sequence; identical to SEQ ID NO: 17847
  GFR-binding peptide
  MOD_RES (13), (14), (15), (16), (17): Xaa is A or G
  MOD_RES (18), (19), (20), (21): Xaa is A or G or is absent

SEQ ID NO: 81609 - protein, 39 aa, Artificial Sequence; identical to SEQ ID NO: 48856
  GFR-binding peptide
  MOD_RES (2), (33), (34): Xaa is C or S

SEQ ID NO: 81610 - protein, 40 aa, Artificial Sequence; identical to SEQ ID NO: 17849
  GFR-binding peptide
  MOD_RES (1), (3), (40): Xaa is C or S
  MOD_RES (16), (17), (18), (19), (20): Xaa is A or G
  MOD_RES (21), (22), (23), (24): Xaa is A or G or is absent

SEQ ID NO: 81611 - protein, 34 aa, Artificial Sequence; identical to SEQ ID NO: 46304
  GFR-binding peptide
  MOD_RES (1), (3), (34): Xaa is C or S

SEQ ID NO: 81612 - protein, 36 aa, Artificial Sequence; identical to SEQ ID NO: 50116
  GFR-binding peptide
  MOD_RES (2), (35), (36): Xaa is C or S
  MOD_RES (13), (14), (15), (16), (17): Xaa is A or G
  MOD_RES (18), (19), (20), (21): Xaa is A or G or is absent

SEQ ID NO: 81613 - protein, 32 aa, Artificial Sequence; identical to SEQ ID NO: 48862
  GFR-binding peptide
  MOD_RES (11), (12), (13), (14), (15): Xaa is A or G
  MOD_RES (16), (17), (18), (19): Xaa is A or G or is absent

SEQ ID NO: 81614 - protein, 32 aa, Artificial Sequence; identical to SEQ ID NO: 17854
  GFR-binding peptide

SEQ ID NO: 81615 - protein, 36 aa, Artificial Sequence; identical to SEQ ID NO: 46314
  GFR-binding peptide
  MOD_RES (2), (4): Xaa is C or S
  MOD_RES (15), (16), (17), (18), (19): Xaa is A or G
  MOD_RES (20), (21), (22), (23): Xaa is A or G or is absent

SEQ ID NO: 81616 - protein, 41 aa, Artificial Sequence; identical to SEQ ID NO: 50125
  GFR-binding peptide
  MOD_RES (1), (3), (36), (37): Xaa is C or S
  MOD_RES (14), (15), (16), (17), (18): Xaa is A or G
  MOD_RES (19), (20), (21), (22): Xaa is A or G or is absent

SEQ ID NO: 81617 - protein, 39 aa, Artificial Sequence; identical to SEQ ID NO: 17056
  GFR-binding peptide
  MOD_RES (2), (36): Xaa is C or S
  MOD_RES (14), (15), (16), (17), (18): Xaa is A or G
  MOD_RES (19), (20), (21), (22): Xaa is A or G or is absent

SEQ ID NO: 81618 - protein, 41 aa, Artificial Sequence; identical to SEQ ID NO: 17859
  GFR-binding peptide
  MOD_RES (1), (3), (37): Xaa is C or S

SEQ ID NO: 81619 - protein, 36 aa, Artificial Sequence; identical to SEQ ID NO: 17860
  GFR-binding peptide
  MOD_RES (2), (36): Xaa is C or S
  MOD_RES (14), (15), (16), (17), (18): Xaa is A or G
  MOD_RES (19), (20), (21), (22): Xaa is A or G or is absent

SEQ ID NO: 81620 - protein, 36 aa, Artificial Sequence; identical to SEQ ID NO: 46321
  GFR-binding peptide
  MOD_RES (2), (33), (34): Xaa is C or S

SEQ ID NO: 81621 - protein, 32 aa, Artificial Sequence; identical to SEQ ID NO: 17862
  GFR-binding peptide

SEQ ID NO: 81622 - protein, 42 aa, Artificial Sequence; identical to SEQ ID NO: 17863
  GFR-binding peptide
  MOD_RES (1), (38): Xaa is C or S

SEQ ID NO: 81623 - protein, 32 aa, Artificial Sequence; identical to SEQ ID NO: 17057
  GFR-binding peptide

SEQ ID NO: 81624 - protein, 42 aa, Artificial Sequence; identical to SEQ ID NO: 17058
  GFR-binding peptide
  MOD_RES (1), (38): Xaa is C or S

SEQ ID NO: 81625 - protein, 40 aa, Artificial Sequence; identical to SEQ ID NO: 47612
  GFR-binding peptide
  MOD_RES (2), (4), (35), (36): Xaa is C or S

SEQ ID NO: 81626 - protein, 34 aa, Artificial Sequence; identical to SEQ ID NO: 17059
  GFR-binding peptide
  MOD_RES (33), (33): Xaa is C or S
  MOD_RES (11), (12), (13), (14), (15): Xaa is A or G
  MOD_RES (16), (17), (18), (19): Xaa is A or G or is absent

SEQ ID NO: 81627 - protein, 35 aa, Artificial Sequence; identical to SEQ ID NO: 17060
  GFR-binding peptide
  MOD_RES (35), (35): Xaa is C or S
  MOD_RES (11), (12), (13), (14), (15): Xaa is A or G
  MOD_RES (16), (17), (18), (19): Xaa is A or G or is absent

SEQ ID NO: 81628 - protein, 43 aa, Artificial Sequence; identical to SEQ ID NO: 17062
  GFR-binding peptide
  MOD_RES (1), (3), (37): Xaa is C or S
  MOD_RES (15), (16), (17), (18), (19): Xaa is A or G
  MOD_RES (20), (21), (22), (23): Xaa is A or G or is absent

SEQ ID NO: 81629 - protein, 33 aa, Artificial Sequence; identical to SEQ ID NO: 17866
  GFR-binding peptide
  MOD_RES (12), (13), (14), (15), (16): Xaa is A or G
  MOD_RES (17), (18), (19), (20): Xaa is A or G or is absent

SEQ ID NO: 81630 - protein, 40 aa, Artificial Sequence; identical to SEQ ID NO: 17868
  GFR-binding peptide
  MOD_RES (1), (3), (40): Xaa is C or S
  MOD_RES (16), (17), (18), (19), (20): Xaa is A or G
  MOD_RES (21), (22), (23), (24): Xaa is A or G or is absent

SEQ ID NO: 81631 - protein, 40 aa, Artificial Sequence; identical to SEQ ID NO: 17063
  GFR-binding peptide
  MOD_RES (34), (34): Xaa is C or S
  MOD_RES (12), (13), (14), (15), (16): Xaa is A or G
  MOD_RES (17), (18), (19), (20): Xaa is A or G or is absent

SEQ ID NO: 81632 - protein, 38 aa, Artificial Sequence; identical to SEQ ID NO: 17064
  GFR-binding peptide
  MOD_RES (37), (37): Xaa is C or S
  MOD_RES (13), (14), (15), (16), (17): Xaa is A or G
  MOD_RES (18), (19), (20), (21): Xaa is A or G or is absent

SEQ ID NO: 81633 - protein, 30 aa, Artificial Sequence; identical to SEQ ID NO: 46334
  GFR-binding peptide

SEQ ID NO: 81634 - protein, 41 aa, Artificial Sequence; identical to SEQ ID NO: 17065
  GFR-binding peptide
  MOD_RES (2), (4), (38): Xaa is C or S
  MOD_RES (16), (17), (18), (19), (20): Xaa is A or G
  MOD_RES (21), (22), (23), (24): Xaa is A or G or is absent

SEQ ID NO: 81635 - protein, 37 aa, Artificial Sequence; identical to SEQ ID NO: 17869
  GFR-binding peptide
  MOD_RES (1), (3): Xaa is C or S

SEQ ID NO: 81636 - protein, 36 aa, Artificial Sequence; identical to SEQ ID NO: 17066
  GFR-binding peptide
  MOD_RES (2), (36): Xaa is C or S
  MOD_RES (14), (15), (16), (17), (18): Xaa is A or G
  MOD_RES (19), (20), (21), (22): Xaa is A or G or is absent

SEQ ID NO: 81637 - protein, 40 aa, Artificial Sequence; identical to SEQ ID NO: 48893
  GFR-binding peptide
  MOD_RES (2), (4), (37), (38): Xaa is C or S
  MOD_RES (15), (16), (17), (18), (19): Xaa is A or G
  MOD_RES (20), (21), (22), (23): Xaa is A or G or is absent

SEQ ID NO: 81638 - protein, 43 aa, Artificial Sequence; identical to SEQ ID NO: 17871
  GFR-binding peptide
  MOD_RES (2), (4), (38): Xaa is C or S

SEQ ID NO: 81639 - protein, 33 aa, Artificial Sequence; identical to SEQ ID NO: 46341
  GFR-binding peptide
  MOD_RES (1), (32), (33): Xaa is C or S

SEQ ID NO: 81640 - protein, 35 aa, Artificial Sequence; identical to SEQ ID NO: 48896
  GFR-binding peptide
  MOD_RES (2), (4), (35): Xaa is C or S

SEQ ID NO: 81641 - protein, 36 aa, Artificial Sequence; identical to SEQ ID NO: 50147
  GFR-binding peptide
  MOD_RES (2), (4): Xaa is C or S
  MOD_RES (15), (16), (17), (18), (19): Xaa is A or G
  MOD_RES (20), (21), (22), (23): Xaa is A or G or is absent

SEQ ID NO: 81642 - protein, 40 aa, Artificial Sequence; identical to SEQ ID NO: 17875
  GFR-binding peptide
  MOD_RES (36), (36): Xaa is C or S

SEQ ID NO: 81643 - protein, 36 aa, Artificial Sequence; identical to SEQ ID NO: 17071
  GFR-binding peptide
  MOD_RES (1), (3): Xaa is C or S

SEQ ID NO: 81644 - protein, 38 aa, Artificial Sequence; identical to SEQ ID NO: 17876
  GFR-binding peptide
  MOD_RES (2), (4), (38): Xaa is C or S
  MOD_RES (16), (17), (18), (19), (20): Xaa is A or G
  MOD_RES (21), (22), (23), (24): Xaa is A or G or is absent

SEQ ID NO: 81645 - protein, 39 aa, Artificial Sequence; identical to SEQ ID NO: 46344
  GFR-binding peptide
  MOD_RES (2), (33), (34): Xaa is C or S

SEQ ID NO: 81646 - protein, 34 aa, Artificial Sequence; identical to SEQ ID NO: 50151
  GFR-binding peptide
  MOD_RES (2), (33), (34): Xaa is C or S

SEQ ID NO: 81647 - protein, 35 aa, Artificial Sequence; identical to SEQ ID NO: 17877
  GFR-binding peptide

SEQ ID NO: 81648 - protein, 40 aa, Artificial Sequence; identical to SEQ ID NO: 17072
  GFR-binding peptide
  MOD_RES (2), (39): Xaa is C or S
  MOD_RES (15), (16), (17), (18), (19): Xaa is A or G
  MOD_RES (20), (21), (22), (23): Xaa is A or G or is absent

SEQ ID NO: 81649 - protein, 37 aa, Artificial Sequence; identical to SEQ ID NO: 17073
  GFR-binding peptide
  MOD_RES (34), (34): Xaa is C or S
  MOD_RES (12), (13), (14), (15), (16): Xaa is A or G
  MOD_RES (17), (18), (19), (20): Xaa is A or G or is absent

SEQ ID NO: 81650 - protein, 36 aa, Artificial Sequence; identical to SEQ ID NO: 17878
  GFR-binding peptide
  MOD_RES (35), (35): Xaa is C or S

SEQ ID NO: 81651 - protein, 38 aa, Artificial Sequence; identical to SEQ ID NO: 17879
  GFR-binding peptide
  MOD_RES (2), (4), (38): Xaa is C or S
  MOD_RES (16), (17), (18), (19), (20): Xaa is A or G
  MOD_RES (21), (22), (23), (24): Xaa is A or G or is absent

SEQ ID NO: 81652 - protein, 35 aa, Artificial Sequence; identical to SEQ ID NO: 50155
  GFR-binding peptide
  MOD_RES (1), (32), (33): Xaa is C or S

SEQ ID NO: 81653 - protein, 37 aa, Artificial Sequence; identical to SEQ ID NO: 17074
  GFR-binding peptide
  MOD_RES (36), (36): Xaa is C or S
  MOD_RES (12), (13), (14), (15), (16): Xaa is A or G
  MOD_RES (17), (18), (19), (20): Xaa is A or G or is absent

SEQ ID NO: 81654 - protein, 40 aa, Artificial Sequence; identical to SEQ ID NO: 17075
  GFR-binding peptide
  MOD_RES (2), (4): Xaa is C or S
  MOD_RES (17), (18), (19), (20), (21): Xaa is A or G
  MOD_RES (22), (23), (24), (25): Xaa is A or G or is absent

SEQ ID NO: 81655 - protein, 37 aa, Artificial Sequence; identical to SEQ ID NO: 17076
  GFR-binding peptide
  MOD_RES (37), (37): Xaa is C or S

SEQ ID NO: 81656 - protein, 39 aa, Artificial Sequence; identical to SEQ ID NO: 47643
  GFR-binding peptide
  MOD_RES (1), (3), (36), (37): Xaa is C or S
  MOD_RES (14), (15), (16), (17), (18): Xaa is A or G
  MOD_RES (19), (20), (21), (22): Xaa is A or G or is absent

SEQ ID NO: 81657 - protein, 33 aa, Artificial Sequence; identical to SEQ ID NO: 50160
  GFR-binding peptide
  MOD_RES (1), (32), (33): Xaa is C or S

SEQ ID NO: 81658 - protein, 36 aa, Artificial Sequence; identical to SEQ ID NO: 17078
  GFR-binding peptide
  MOD_RES (2), (2): Xaa is C or S
  MOD_RES (15), (16), (17), (18), (19): Xaa is A or G
  MOD_RES (20), (21), (22), (23): Xaa is A or G or is absent

SEQ ID NO: 81659 - protein, 37 aa, Artificial Sequence; identical to SEQ ID NO: 17886
  GFR-binding peptide
  MOD_RES (1), (3): Xaa is C or S

SEQ ID NO: 81660 - protein, 39 aa, Artificial Sequence; identical to SEQ ID NO: 17888
  GFR-binding peptide
  MOD_RES (2), (39): Xaa is C or S
  MOD_RES (15), (16), (17), (18), (19): Xaa is A or G
  MOD_RES (20), (21), (22), (23): Xaa is A or G or is absent

SEQ ID NO: 81661 - protein, 37 aa, Artificial Sequence; identical to SEQ ID NO: 17889
  GFR-binding peptide
  MOD_RES (2), (2): Xaa is C or S
  MOD_RES (15), (16), (17), (18), (19): Xaa is A or G
  MOD_RES (20), (21), (22), (23): Xaa is A or G or is absent

SEQ ID NO: 81662 - protein, 34 aa, Artificial Sequence; identical to SEQ ID NO: 17081
  GFR-binding peptide

SEQ ID NO: 81663 - protein, 39 aa, Artificial Sequence; identical to SEQ ID NO: 17890
  GFR-binding peptide
  MOD_RES (1), (38): Xaa is C or S

SEQ ID NO: 81664 - protein, 37 aa, Artificial Sequence; identical to SEQ ID NO: 17082
  GFR-binding peptide
  MOD_RES (2), (4): Xaa is C or S

SEQ ID NO: 81665 - protein, 37 aa, Artificial Sequence; identical to SEQ ID NO: 17893
  GFR-binding peptide
  MOD_RES (1), (3): Xaa is C or S

SEQ ID NO: 81666 - protein, 38 aa, Artificial Sequence; identical to SEQ ID NO: 46367
  GFR-binding peptide
  MOD_RES (2), (35), (36): Xaa is C or S
  MOD_RES (13), (14), (15), (16), (17): Xaa is A or G
  MOD_RES (18), (19), (20), (21): Xaa is A or G or is absent

SEQ ID NO: 81667 - protein, 34 aa, Artificial Sequence; identical to SEQ ID NO: 50171
  GFR-binding peptide
  MOD_RES (1), (3), (34): Xaa is C or S

SEQ ID NO: 81668 - protein, 37 aa, Artificial Sequence; identical to SEQ ID NO: 17084
  GFR-binding peptide
  MOD_RES (1), (1): Xaa is C or S
  MOD_RES (14), (15), (16), (17), (18): Xaa is A or G
  MOD_RES (19), (20), (21), (22): Xaa is A or G or is absent

SEQ ID NO: 81669 - protein, 43 aa, Artificial Sequence; identical to SEQ ID NO: 17894
  GFR-binding peptide
  MOD_RES (2), (4), (38): Xaa is C or S

SEQ ID NO: 81670 - protein, 37 aa, Artificial Sequence; identical to SEQ ID NO: 48924
  GFR-binding peptide
  MOD_RES (1), (3), (36), (37): Xaa is C or S
  MOD_RES (14), (15), (16), (17), (18): Xaa is A or G
  MOD_RES (19), (20), (21), (22): Xaa is A or G or is absent

SEQ ID NO: 81671 - protein, 32 aa, Artificial Sequence; identical to SEQ ID NO: 50173
  GFR-binding peptide
  MOD_RES (1), (32): Xaa is C or S

SEQ ID NO: 81672 - protein, 33 aa, Artificial Sequence; identical to SEQ ID NO: 17896
  GFR-binding peptide
  MOD_RES (12), (13), (14), (15), (16): Xaa is A or G
  MOD_RES (17), (18), (19), (20): Xaa is A or G or is absent

SEQ ID NO: 81673 - protein, 42 aa, Artificial Sequence; identical to SEQ ID NO: 17898
  GFR-binding peptide
  MOD_RES (1), (38): Xaa is C or S
  MOD_RES (14), (15), (16), (17), (18): Xaa is A or G
  MOD_RES (19), (20), (21), (22): Xaa is A or G or is absent

SEQ ID NO: 81674 - protein, 36 aa, Artificial Sequence; identical to SEQ ID NO: 50177
  GFR-binding peptide
  MOD_RES (2), (35), (36): Xaa is C or S
  MOD_RES (13), (14), (15), (16), (17): Xaa is A or G
  MOD_RES (18), (19), (20), (21): Xaa is A or G or is absent

SEQ ID NO: 81675 - protein, 33 aa, Artificial Sequence; identical to SEQ ID NO: 46370
  GFR-binding peptide
  MOD_RES (1), (3): Xaa is C or S

SEQ ID NO: 81676 - protein, 39 aa, Artificial Sequence; identical to SEQ ID NO: 17900
  GFR-binding peptide
  MOD_RES (33), (33): Xaa is C or S
  MOD_RES (11), (12), (13), (14), (15): Xaa is A or G
  MOD_RES (16), (17), (18), (19): Xaa is A or G or is absent

SEQ ID NO: 81677 - protein, 40 aa, Artificial Sequence; identical to SEQ ID NO: 17088
  GFR-binding peptide
  MOD_RES (1), (3), (37): Xaa is C or S
  MOD_RES (15), (16), (17), (18), (19): Xaa is A or G
  MOD_RES (20), (21), (22), (23): Xaa is A or G or is absent

SEQ ID NO: 81678 - protein, 36 aa, Artificial Sequence; identical to SEQ ID NO: 48932
  GFR-binding peptide
  MOD_RES (2), (33), (34): Xaa is C or S

SEQ ID NO: 81679 - protein, 33 aa, Artificial Sequence; identical to SEQ ID NO: 50179
  GFR-binding peptide
  MOD_RES (1), (3): Xaa is C or S

SEQ ID NO: 81680 - protein, 38 aa, Artificial Sequence; identical to SEQ ID NO: 17901
  GFR-binding peptide
  MOD_RES (1), (38): Xaa is C or S

SEQ ID NO: 81681 - protein, 41 aa, Artificial Sequence; identical to SEQ ID NO: 17091
  GFR-binding peptide
  MOD_RES (1), (35): Xaa is C or S
  MOD_RES (13), (14), (15), (16), (17): Xaa is A or G
  MOD_RES (18), (19), (20), (21): Xaa is A or G or is absent

SEQ ID NO: 81682 - protein, 35 aa, Artificial Sequence; identical to SEQ ID NO: 17902
  GFR-binding peptide

SEQ ID NO: 81683 - protein, 35 aa, Artificial Sequence; identical to SEQ ID NO: 46381
  GFR-binding peptide
  MOD_RES (1), (3), (34), (35): Xaa is C or S

SEQ ID NO: 81684 - protein, 35 aa, Artificial Sequence; identical to SEQ ID NO: 47663
  GFR-binding peptide
  MOD_RES (1), (3), (34), (35): Xaa is C or S

SEQ ID NO: 81685 - protein, 40 aa, Artificial Sequence; identical to SEQ ID NO: 17092
  GFR-binding peptide
  MOD_RES (2), (39): Xaa is C or S

SEQ ID NO: 81686 - protein, 36 aa, Artificial Sequence; identical to SEQ ID NO: 17094
  GFR-binding peptide
  MOD_RES (33), (33): Xaa is C or S
  MOD_RES (11), (12), (13), (14), (15): Xaa is A or G
  MOD_RES (16), (17), (18), (19): Xaa is A or G or is absent

SEQ ID NO: 81687 - protein, 38 aa, Artificial Sequence; identical to SEQ ID NO: 17095
  GFR-binding peptide
  MOD_RES (2), (36): Xaa is C or S

SEQ ID NO: 81688 - protein, 38 aa, Artificial Sequence; identical to SEQ ID NO: 17096
  GFR-binding peptide
  MOD_RES (2), (2): Xaa is C or S

SEQ ID NO: 81689 - protein, 32 aa, Artificial Sequence; identical to SEQ ID NO: 17904
  GFR-binding peptide
  MOD_RES (11), (12), (13), (14), (15): Xaa is A or G
  MOD_RES (16), (17), (18), (19): Xaa is A or G or is absent

SEQ ID NO: 81690 - protein, 39 aa, Artificial Sequence; identical to SEQ ID NO: 17099
  GFR-binding peptide
  MOD_RES (35), (35): Xaa is C or S
  MOD_RES (11), (12), (13), (14), (15): Xaa is A or G
  MOD_RES (16), (17), (18), (19): Xaa is A or G or is absent

SEQ ID NO: 81691 - protein, 38 aa, Artificial Sequence; identical to SEQ ID NO: 17906
  GFR-binding peptide
  MOD_RES (36), (36): Xaa is C or S

SEQ ID NO: 81692 - protein, 42 aa, Artificial Sequence; identical to SEQ ID NO: 47667
  GFR-binding peptide
  MOD_RES (2), (4), (37), (38): Xaa is C or S
  MOD_RES (15), (16), (17), (18), (19): Xaa is A or G
  MOD_RES (20), (21), (22), (23): Xaa is A or G or is absent

SEQ ID NO: 81693 - protein, 38 aa, Artificial Sequence; identical to SEQ ID NO: 17101
  GFR-binding peptide
  MOD_RES (36), (36): Xaa is C or S

SEQ ID NO: 81694 - protein, 38 aa, Artificial Sequence; identical to SEQ ID NO: 50193
  GFR-binding peptide
  MOD_RES (2), (4), (35), (36): Xaa is C or S

SEQ ID NO: 81695 - protein, 39 aa, Artificial Sequence; identical to SEQ ID NO: 17102
  GFR-binding peptide
  MOD_RES (37), (37): Xaa is C or S

SEQ ID NO: 81696 - protein, 44 aa, Artificial Sequence; identical to SEQ ID NO: 17911
  GFR-binding peptide
  MOD_RES (2), (4), (41): Xaa is C or S
  MOD_RES (17), (18), (19), (20), (21): Xaa is A or G
  MOD_RES (22), (23), (24), (25): Xaa is A or G or is absent

SEQ ID NO: 81697 - protein, 39 aa, Artificial Sequence; identical to SEQ ID NO: 17912
  GFR-binding peptide
  MOD_RES (35), (35): Xaa is C or S
  MOD_RES (11), (12), (13), (14), (15): Xaa is A or G
  MOD_RES (16), (17), (18), (19): Xaa is A or G or is absent

SEQ ID NO: 81698 - protein, 43 aa, Artificial Sequence; identical to SEQ ID NO: 17103
  GFR-binding peptide
  MOD_RES (2), (39): Xaa is C or S
  MOD_RES (15), (16), (17), (18), (19): Xaa is A or G
  MOD_RES (20), (21), (22), (23): Xaa is A or G or is absent

SEQ ID NO: 81699 - protein, 40 aa, Artificial Sequence; identical to SEQ ID NO: 17913
  GFR-binding peptide
  MOD_RES (34), (34): Xaa is C or S
  MOD_RES (12), (13), (14), (15), (16): Xaa is A or G
  MOD_RES (17), (18), (19), (20): Xaa is A or G or is absent

SEQ ID NO: 81700 - protein, 42 aa, Artificial Sequence; identical to SEQ ID NO: 17104
  GFR-binding peptide
  MOD_RES (1), (3), (37): Xaa is C or S

SEQ ID NO: 81701 - protein, 34 aa, Artificial Sequence; identical to SEQ ID NO: 17914
  GFR-binding peptide
  MOD_RES (12), (13), (14), (15), (16): Xaa is A or G
  MOD_RES (17), (18), (19), (20): Xaa is A or G or is absent

SEQ ID NO: 81702 - protein, 39 aa, Artificial Sequence; identical to SEQ ID NO: 17915
  GFR-binding peptide
  MOD_RES (33), (33): Xaa is C or S

SEQ ID NO: 81703 - protein, 35 aa, Artificial Sequence; identical to SEQ ID NO: 17106
  GFR-binding peptide
  MOD_RES (13), (14), (15), (16), (17): Xaa is A or G
  MOD_RES (18), (19), (20), (21): Xaa is A or G or is absent

SEQ ID NO: 81704 - protein, 35 aa, Artificial Sequence; identical to SEQ ID NO: 47679
  GFR-binding peptide
  MOD_RES (33), (34): Xaa is C or S
  MOD_RES (11), (12), (13), (14), (15): Xaa is A or G
  MOD_RES (16), (17), (18), (19): Xaa is A or G or is absent

SEQ ID NO: 81705 - protein, 42 aa, Artificial Sequence; identical to SEQ ID NO: 17916
  GFR-binding peptide
  MOD_RES (2), (39): Xaa is C or S
  MOD_RES (15), (16), (17), (18), (19): Xaa is A or G
  MOD_RES (20), (21), (22), (23): Xaa is A or G or is absent

SEQ ID NO: 81706 - protein, 35 aa, Artificial Sequence; identical to SEQ ID NO: 46400
  GFR-binding peptide
  MOD_RES (2), (35): Xaa is C or S
  MOD_RES (13), (14), (15), (16), (17): Xaa is A or G
  MOD_RES (18), (19), (20), (21): Xaa is A or G or is absent

SEQ ID NO: 81707 - protein, 37 aa, Artificial Sequence; identical to SEQ ID NO: 48964
  GFR-binding peptide
  MOD_RES (1), (32), (33): Xaa is C or S

SEQ ID NO: 81708 - protein, 38 aa, Artificial Sequence; identical to SEQ ID NO: 17107
  GFR-binding peptide
  MOD_RES (35), (35): Xaa is C or S

SEQ ID NO: 81709 - protein, 37 aa, Artificial Sequence; identical to SEQ ID NO: 17108
  GFR-binding peptide
  MOD_RES (33), (33): Xaa is C or S

SEQ ID NO: 81710 - protein, 44 aa, Artificial Sequence; identical to SEQ ID NO: 17918
  GFR-binding peptide
  MOD_RES (1), (3), (40): Xaa is C or S

SEQ ID NO: 81711 - protein, 38 aa, Artificial Sequence; identical to SEQ ID NO: 17109
  GFR-binding peptide
  MOD_RES (2), (4), (38): Xaa is C or S

SEQ ID NO: 81712 - protein, 32 aa, Artificial Sequence; identical to SEQ ID NO: 48971
  GFR-binding peptide
  MOD_RES (1), (32): Xaa is C or S

SEQ ID NO: 81713 - protein, 37 aa, Artificial Sequence; identical to SEQ ID NO: 50205
  GFR-binding peptide
  MOD_RES (2), (4), (35), (36): Xaa is C or S

SEQ ID NO: 81714 - protein, 40 aa, Artificial Sequence; identical to SEQ ID NO: 17920
  GFR-binding peptide
  MOD_RES (2), (36): Xaa is C or S

SEQ ID NO: 81715 - protein, 39 aa, Artificial Sequence; identical to SEQ ID NO: 17921
  GFR-binding peptide
  MOD_RES (1), (3), (37): Xaa is C or S

SEQ ID NO: 81716 - protein, 37 aa, Artificial Sequence; identical to SEQ ID NO: 17922
  GFR-binding peptide
  MOD_RES (2), (2): Xaa is C or S
  MOD_RES (15), (16), (17), (18), (19): Xaa is A or G
  MOD_RES (20), (21), (22), (23): Xaa is A or G or is absent

SEQ ID NO: 81717 - protein, 35 aa, Artificial Sequence; identical to SEQ ID NO: 17112
  GFR-binding peptide
  MOD_RES (35), (35): Xaa is C or S

SEQ ID NO: 81718 - protein, 34 aa, Artificial Sequence; identical to SEQ ID NO: 47690
  GFR-binding peptide
  MOD_RES (2), (33), (34): Xaa is C or S

SEQ ID NO: 81719 - protein, 41 aa, Artificial Sequence; identical to SEQ ID NO: 17925
  GFR-binding peptide
  MOD_RES (2), (4), (41): Xaa is C or S
  MOD_RES (17), (18), (19), (20), (21): Xaa is A or G
  MOD_RES (22), (23), (24), (25): Xaa is A or G or is absent

SEQ ID NO: 81720 - protein, 38 aa, Artificial Sequence; identical to SEQ ID NO: 17926
  GFR-binding peptide
  MOD_RES (2), (2): Xaa is C or S
  MOD_RES (15), (16), (17), (18), (19): Xaa is A or G
  MOD_RES (20), (21), (22), (23): Xaa is A or G or is absent

SEQ ID NO: 81721 - protein, 38 aa, Artificial Sequence; identical to SEQ ID NO: 17927
  GFR-binding peptide
  MOD_RES (1), (3): Xaa is C or S
  MOD_RES (16), (17), (18), (19), (20): Xaa is A or G
  MOD_RES (21), (22), (23), (24): Xaa is A or G or is absent

SEQ ID NO: 81722 - protein, 33 aa, Artificial Sequence; identical to SEQ ID NO: 17928
  GFR-binding peptide

SEQ ID NO: 81723 - protein, 35 aa, Artificial Sequence; identical to SEQ ID NO: 17114
  GFR-binding peptide
  MOD_RES (33), (33): Xaa is C or S

SEQ ID NO: 81724 - protein, 40 aa, Artificial Sequence; identical to SEQ ID NO: 17115
  GFR-binding peptide
  MOD_RES (37), (37): Xaa is C or S
  MOD_RES (13), (14), (15), (16), (17): Xaa is A or G
  MOD_RES (18), (19), (20), (21): Xaa is A or G or is absent

SEQ ID NO: 81725 - protein, 41 aa, Artificial Sequence; identical to SEQ ID NO: 17929
  GFR-binding peptide
  MOD_RES (1), (38): Xaa is C or S
  MOD_RES (14), (15), (16), (17), (18): Xaa is A or G
  MOD_RES (19), (20), (21), (22): Xaa is A or G or is absent

SEQ ID NO: 81726 - protein, 37 aa, Artificial Sequence; identical to SEQ ID NO: 17930
  GFR-binding peptide
  MOD_RES (34), (34): Xaa is C or S
  MOD_RES (12), (13), (14), (15), (16): Xaa is A or G
  MOD_RES (17), (18), (19), (20): Xaa is A or G or is absent

SEQ ID NO: 81727 - protein, 38 aa, Artificial Sequence; identical to SEQ ID NO: 17118
  GFR-binding peptide
  MOD_RES (2), (4), (38): Xaa is C or S

SEQ ID NO: 81728 - protein, 38 aa, Artificial Sequence; identical to SEQ ID NO: 46411
  GFR-binding peptide
  MOD_RES (1), (32), (33): Xaa is C or S

SEQ ID NO: 81729 - protein, 36 aa, Artificial Sequence; identical to SEQ ID NO: 17932
  GFR-binding peptide
  MOD_RES (1), (1): Xaa is C or S

SEQ ID NO: 81730 - protein, 36 aa, Artificial Sequence; identical to SEQ ID NO: 50215
  GFR-binding peptide
  MOD_RES (1), (32), (33): Xaa is C or S

SEQ ID NO: 81731 - protein, 39 aa, Artificial Sequence; identical to SEQ ID NO: 17934
  GFR-binding peptide
  MOD_RES (1), (3), (37): Xaa is C or S

SEQ ID NO: 81732 - protein, 38 aa, Artificial Sequence; identical to SEQ ID NO: 17936
  GFR-binding peptide
  MOD_RES (33), (33): Xaa is C or S

SEQ ID NO: 81733 - protein, 41 aa, Artificial Sequence; identical to SEQ ID NO: 17939
  GFR-binding peptide
  MOD_RES (2), (36): Xaa is C or S

SEQ ID NO: 81734 - protein, 36 aa, Artificial Sequence; identical to SEQ ID NO: 50219
  GFR-binding peptide
  MOD_RES (1), (34), (35): Xaa is C or S
  MOD_RES (12), (13), (14), (15), (16): Xaa is A or G
  MOD_RES (17), (18), (19), (20): Xaa is A or G or is absent

SEQ ID NO: 81735 - protein, 34 aa, Artificial Sequence; identical to SEQ ID NO: 17940
  GFR-binding peptide
  MOD_RES (11), (12), (13), (14), (15): Xaa is A or G
  MOD_RES (16), (17), (18), (19): Xaa is A or G or is absent

SEQ ID NO: 81736 - protein, 42 aa, Artificial Sequence; identical to SEQ ID NO: 17122
  GFR-binding peptide
  MOD_RES (2), (4), (38): Xaa is C or S
  MOD_RES (16), (17), (18), (19), (20): Xaa is A or G
  MOD_RES (21), (22), (23), (24): Xaa is A or G or is absent

SEQ ID NO: 81737 - protein, 32 aa, Artificial Sequence; identical to SEQ ID NO: 17126
  GFR-binding peptide

SEQ ID NO: 81738 - protein, 41 aa, Artificial Sequence; identical to SEQ ID NO: 17941
  GFR-binding peptide
  MOD_RES (2), (4), (41): Xaa is C or S
  MOD_RES (17), (18), (19), (20), (21): Xaa is A or G
  MOD_RES (22), (23), (24), (25): Xaa is A or G or is absent

SEQ ID NO: 81739 - protein, 36 aa, Artificial Sequence; identical to SEQ ID NO: 17942
  GFR-binding peptide
  MOD_RES (1), (3): Xaa is C or S

SEQ ID NO: 81740 - protein, 40 aa, Artificial Sequence; identical to SEQ ID NO: 17944
  GFR-binding peptide
  MOD_RES (1), (38): Xaa is C or S
  MOD_RES (14), (15), (16), (17), (18): Xaa is A or G
  MOD_RES (19), (20), (21), (22): Xaa is A or G or is absent

SEQ ID NO: 81741 - protein, 40 aa, Artificial Sequence; identical to SEQ ID NO: 46422
  GFR-binding peptide
  MOD_RES (1), (3), (34), (35): Xaa is C or S

SEQ ID NO: 81742 - protein, 41 aa, Artificial Sequence; identical to SEQ ID NO: 17129
  GFR-binding peptide
  MOD_RES (2), (4), (38): Xaa is C or S
  MOD_RES (16), (17), (18), (19), (20): Xaa is A or G
  MOD_RES (21), (22), (23), (24): Xaa is A or G or is absent

SEQ ID NO: 81743 - protein, 34 aa, Artificial Sequence; identical to SEQ ID NO: 50225
  GFR-binding peptide
  MOD_RES (1), (3), (34): Xaa is C or S

SEQ ID NO: 81744 - protein, 36 aa, Artificial Sequence; identical to SEQ ID NO: 50229
  GFR-binding peptide
  MOD_RES (2), (4): Xaa is C or S
  MOD_RES (15), (16), (17), (18), (19): Xaa is A or G
  MOD_RES (20), (21), (22), (23): Xaa is A or G or is absent

SEQ ID NO: 81745 - protein, 35 aa, Artificial Sequence; identical to SEQ ID NO: 17130
  GFR-binding peptide
  MOD_RES (34), (34): Xaa is C or S
  MOD_RES (12), (13), (14), (15), (16): Xaa is A or G
  MOD_RES (17), (18), (19), (20): Xaa is A or G or is absent

SEQ ID NO: 81746 - protein, 39 aa, Artificial Sequence; identical to SEQ ID NO: 17945
  GFR-binding peptide
  MOD_RES (36), (36): Xaa is C or S
  MOD_RES (12), (13), (14), (15), (16): Xaa is A or G
  MOD_RES (17), (18), (19), (20): Xaa is A or G or is absent

SEQ ID NO: 81747 - protein, 41 aa, Artificial Sequence; identical to SEQ ID NO: 49000
  GFR-binding peptide
  MOD_RES (2), (4), (37), (38): Xaa is C or S
  MOD_RES (15), (16), (17), (18), (19): Xaa is A or G
  MOD_RES (20), (21), (22), (23): Xaa is A or G or is absent

SEQ ID NO: 81748 - protein, 32 aa, Artificial Sequence; identical to SEQ ID NO: 17946
  GFR-binding peptide
  MOD_RES (11), (12), (13), (14), (15): Xaa is A or G
  MOD_RES (16), (17), (18), (19): Xaa is A or G or is absent

SEQ ID NO: 81749 - protein, 36 aa, Artificial Sequence; identical to SEQ ID NO: 46425
  GFR-binding peptide
  MOD_RES (2), (35), (36): Xaa is C or S
  MOD_RES (13), (14), (15), (16), (17): Xaa is A or G
  MOD_RES (18), (19), (20), (21): Xaa is A or G or is absent

SEQ ID NO: 81750 - protein, 33 aa, Artificial Sequence; identical to SEQ ID NO: 17134
  GFR-binding peptide

SEQ ID NO: 81751 - protein, 37 aa, Artificial Sequence; identical to SEQ ID NO: 47726
  GFR-binding peptide
  MOD_RES (33), (34): Xaa is C or S
  MOD_RES (11), (12), (13), (14), (15): Xaa is A or G
  MOD_RES (16), (17), (18), (19): Xaa is A or G or is absent

SEQ ID NO: 81752 - protein, 40 aa, Artificial Sequence; identical to SEQ ID NO: 17948
  GFR-binding peptide
  MOD_RES (37), (37): Xaa is C or S
  MOD_RES (13), (14), (15), (16), (17): Xaa is A or G
  MOD_RES (18), (19), (20), (21): Xaa is A or G or is absent

SEQ ID NO: 81753 - protein, 39 aa, Artificial Sequence; identical to SEQ ID NO: 46429
  GFR-binding peptide
  MOD_RES (2), (4), (35), (36): Xaa is C or S

SEQ ID NO: 81754 - protein, 40 aa, Artificial Sequence; identical to SEQ ID NO: 17949
  GFR-binding peptide
  MOD_RES (1), (3), (37): Xaa is C or S
  MOD_RES (15), (16), (17), (18), (19): Xaa is A or G
  MOD_RES (20), (21), (22), (23): Xaa is A or G or is absent

SEQ ID NO: 81755 - protein, 35 aa, Artificial Sequence; identical to SEQ ID NO: 47729
  GFR-binding peptide
  MOD_RES (1), (3), (34), (35): Xaa is C or S

SEQ ID NO: 81756 - protein, 42 aa, Artificial Sequence; identical to SEQ ID NO: 17951
  GFR-binding peptide
  MOD_RES (2), (39): Xaa is C or S

SEQ ID NO: 81757 - protein, 40 aa, Artificial Sequence; identical to SEQ ID NO: 17952
  GFR-binding peptide
  MOD_RES (2), (36): Xaa is C or S

SEQ ID NO: 81758 - protein, 34 aa, Artificial Sequence; identical to SEQ ID NO: 47730
  GFR-binding peptide
  MOD_RES (31), (32): Xaa is C or S

SEQ ID NO: 81759 - protein, 36 aa, Artificial Sequence; identical to SEQ ID NO: 17135
  GFR-binding peptide
  MOD_RES (34), (34): Xaa is C or S
  MOD_RES (12), (13), (14), (15), (16): Xaa is A or G
  MOD_RES (17), (18), (19), (20): Xaa is A or G or is absent

SEQ ID NO: 81760 - protein, 39 aa, Artificial Sequence; identical to SEQ ID NO: 47731
  GFR-binding peptide
  MOD_RES (1), (3), (36), (37): Xaa is C or S
  MOD_RES (14), (15), (16), (17), (18): Xaa is A or G
  MOD_RES (19), (20), (21), (22): Xaa is A or G or is absent

SEQ ID NO: 81761 - protein, 36 aa, Artificial Sequence; identical to SEQ ID NO: 50245
  GFR-binding peptide
  MOD_RES (2), (33), (34): Xaa is C or S

SEQ ID NO: 81762 - protein, 37 aa, Artificial Sequence; identical to SEQ ID NO: 49004
  GFR-binding peptide
  MOD_RES (2), (4), (35), (36): Xaa is C or S

SEQ ID NO: 81763 - protein, 35 aa, Artificial Sequence; identical to SEQ ID NO: 17138
  GFR-binding peptide

SEQ ID NO: 81764 - protein, 39 aa, Artificial Sequence; identical to SEQ ID NO: 17139
  GFR-binding peptide
  MOD_RES (1), (3), (37): Xaa is C or S

SEQ ID NO: 81765 - protein, 38 aa, Artificial Sequence; identical to SEQ ID NO: 47734
  GFR-binding peptide
  MOD_RES (1), (34), (35): Xaa is C or S
  MOD_RES (12), (13), (14), (15), (16): Xaa is A or G
  MOD_RES (17), (18), (19), (20): Xaa is A or G or is absent

SEQ ID NO: 81766 - protein, 42 aa, Artificial Sequence; identical to SEQ ID NO: 17954
  GFR-binding peptide
  MOD_RES (2), (4), (41): Xaa is C or S

SEQ ID NO: 81767 - protein, 41 aa, Artificial Sequence; identical to SEQ ID NO: 17140
  GFR-binding peptide
  MOD_RES (37), (37): Xaa is C or S

SEQ ID NO: 81768 - protein, 35 aa, Artificial Sequence; identical to SEQ ID NO: 17141
  GFR-binding peptide
  MOD_RES (2), (2): Xaa is C or S

SEQ ID NO: 81769 - protein, 34 aa, Artificial Sequence; identical to SEQ ID NO: 17956
  GFR-binding peptide
  MOD_RES (34), (34): Xaa is C or S

SEQ ID NO: 81770 - protein, 39 aa, Artificial Sequence; identical to SEQ ID NO: 17957
  GFR-binding peptide
  MOD_RES (2), (4): Xaa is C or S
  MOD_RES (17), (18), (19), (20), (21): Xaa is A or G
  MOD_RES (22), (23), (24), (25): Xaa is A or G or is absent

SEQ ID NO: 81771 - protein, 37 aa, Artificial Sequence; identical to SEQ ID NO: 17142
  GFR-binding peptide
  MOD_RES (2), (36): Xaa is C or S
  MOD_RES (14), (15), (16), (17), (18): Xaa is A or G
  MOD_RES (19), (20), (21), (22): Xaa is A or G or is absent

SEQ ID NO: 81772 - protein, 38 aa, Artificial Sequence; identical to SEQ ID NO: 17143
  GFR-binding peptide
  MOD_RES (37), (37): Xaa is C or S
  MOD_RES (13), (14), (15), (16), (17): Xaa is A or G
  MOD_RES (18), (19), (20), (21): Xaa is A or G or is absent

SEQ ID NO: 81773 - protein, 34 aa, Artificial Sequence; identical to SEQ ID NO: 17145
  GFR-binding peptide
  MOD_RES (11), (12), (13), (14), (15): Xaa is A or G
  MOD_RES (16), (17), (18), (19): Xaa is A or G or is absent

SEQ ID NO: 81774 - protein, 44 aa, Artificial Sequence; identical to SEQ ID NO: 17961
  GFR-binding peptide
  MOD_RES (1), (3), (40): Xaa is C or S

SEQ ID NO: 81775 - protein, 38 aa, Artificial Sequence; identical to SEQ ID NO: 17962
  GFR-binding peptide
  MOD_RES (2), (4): Xaa is C or S
  MOD_RES (17), (18), (19), (20), (21): Xaa is A or G
  MOD_RES (22), (23), (24), (25): Xaa is A or G or is absent

SEQ ID NO: 81776 - protein, 42 aa, Artificial Sequence; identical to SEQ ID NO: 17147
  GFR-binding peptide
  MOD_RES (2), (4), (38): Xaa is C or S
  MOD_RES (16), (17), (18), (19), (20): Xaa is A or G
  MOD_RES (21), (22), (23), (24): Xaa is A or G or is absent

SEQ ID NO: 81777 - protein, 40 aa, Artificial Sequence; identical to SEQ ID NO: 46461
  GFR-binding peptide
  MOD_RES (1), (34), (35): Xaa is C or S
  MOD_RES (12), (13), (14), (15), (16): Xaa is A or G
  MOD_RES (17), (18), (19), (20): Xaa is A or G or is absent

SEQ ID NO: 81778 - protein, 35 aa, Artificial Sequence; identical to SEQ ID NO: 49017
  GFR-binding peptide
  MOD_RES (33), (34): Xaa is C or S
  MOD_RES (11), (12), (13), (14), (15): Xaa is A or G
  MOD_RES (16), (17), (18), (19): Xaa is A or G or is absent

SEQ ID NO: 81779 - protein, 38 aa, Artificial Sequence; identical to SEQ ID NO: 17964
  GFR-binding peptide
  MOD_RES (1), (3): Xaa is C or S
  MOD_RES (16), (17), (18), (19), (20): Xaa is A or G
  MOD_RES (21), (22), (23), (24): Xaa is A or G or is absent

SEQ ID NO: 81780 - protein, 39 aa, Artificial Sequence; identical to SEQ ID NO: 17968
  GFR-binding peptide
  MOD_RES (35), (35): Xaa is C or S

SEQ ID NO: 81781 - protein, 38 aa, Artificial Sequence; identical to SEQ ID NO: 17149
  GFR-binding peptide
  MOD_RES (33), (33): Xaa is C or S
  MOD_RES (11), (12), (13), (14), (15): Xaa is A or G
  MOD_RES (16), (17), (18), (19): Xaa is A or G or is absent

SEQ ID NO: 81782 - protein, 36 aa, Artificial Sequence; identical to SEQ ID NO: 17970
  GFR-binding peptide
  MOD_RES (1), (3): Xaa is C or S
  MOD_RES (15), (16), (17), (18), (19): Xaa is A or G
  MOD_RES (20), (21), (22), (23): Xaa is A or G or is absent

SEQ ID NO: 81783 - protein, 37 aa, Artificial Sequence; identical to SEQ ID NO: 47753
  GFR-binding peptide
  MOD_RES (2), (35), (36): Xaa is C or S
  MOD_RES (13), (14), (15), (16), (17): Xaa is A or G
  MOD_RES (18), (19), (20), (21): Xaa is A or G or is absent

SEQ ID NO: 81784 - protein, 38 aa, Artificial Sequence; identical to SEQ ID NO: 17973
  GFR-binding peptide
  MOD_RES (35), (35): Xaa is C or S

SEQ ID NO: 81785 - protein, 38 aa, Artificial Sequence; identical to SEQ ID NO: 17974
  GFR-binding peptide
  MOD_RES (34), (34): Xaa is C or S
  MOD_RES (12), (13), (14), (15), (16): Xaa is A or G
  MOD_RES (17), (18), (19), (20): Xaa is A or G or is absent

SEQ ID NO: 81786 - protein, 42 aa, Artificial Sequence; identical to SEQ ID NO: 47756
  GFR-binding peptide
  MOD_RES (1), (3), (36), (37): Xaa is C or S
  MOD_RES (14), (15), (16), (17), (18): Xaa is A or G
  MOD_RES (19), (20), (21), (22): Xaa is A or G or is absent

SEQ ID NO: 81787 - protein, 36 aa, Artificial Sequence; identical to SEQ ID NO: 17152
  GFR-binding peptide
  MOD_RES (1), (35): Xaa is C or S

SEQ ID NO: 81788 - protein, 33 aa, Artificial Sequence; identical to SEQ ID NO: 49022
  GFR-binding peptide
  MOD_RES (33), (33): Xaa is C or S
  MOD_RES (11), (12), (13), (14), (15): Xaa is A or G
  MOD_RES (16), (17), (18), (19): Xaa is A or G or is absent

SEQ ID NO: 81789 - protein, 37 aa, Artificial Sequence; identical to SEQ ID NO: 17153
  GFR-binding peptide
  MOD_RES (37), (37): Xaa is C or S

SEQ ID NO: 81790 - protein, 35 aa, Artificial Sequence; identical to SEQ ID NO: 46479
  GFR-binding peptide
  MOD_RES (33), (34): Xaa is C or S
  MOD_RES (11), (12), (13), (14), (15): Xaa is A or G
  MOD_RES (16), (17), (18), (19): Xaa is A or G or is absent

SEQ ID NO: 81791 - protein, 41 aa, Artificial Sequence; identical to SEQ ID NO: 50281
  GFR-binding peptide
  MOD_RES (1), (3), (36), (37): Xaa is C or S
  MOD_RES (14), (15), (16), (17), (18): Xaa is A or G
  MOD_RES (19), (20), (21), (22): Xaa is A or G or is absent

SEQ ID NO: 81792 - protein, 43 aa, Artificial Sequence; identical to SEQ ID NO: 17976
  GFR-binding peptide
  MOD_RES (1), (3), (40): Xaa is C or S

SEQ ID NO: 81793 - protein, 40 aa, Artificial Sequence; identical to SEQ ID NO: 17154
  GFR-binding peptide
  MOD_RES (1), (38): Xaa is C or S

SEQ ID NO: 81794 - protein, 33 aa, Artificial Sequence; identical to SEQ ID NO: 50284
  GFR-binding peptide
  MOD_RES (1), (32), (33): Xaa is C or S

SEQ ID NO: 81795 - protein, 45 aa, Artificial Sequence; identical to SEQ ID NO: 17155
  GFR-binding peptide
  MOD_RES (2), (4), (41): Xaa is C or S
  MOD_RES (17), (18), (19), (20), (21): Xaa is A or G
  MOD_RES (22), (23), (24), (25): Xaa is A or G or is absent

SEQ ID NO: 81796 - protein, 43 aa, Artificial Sequence; identical to SEQ ID NO: 17977
  GFR-binding peptide
  MOD_RES (1), (3), (40): Xaa is C or S

SEQ ID NO: 81797 - protein, 41 aa, Artificial Sequence; identical to SEQ ID NO: 17978
  GFR-binding peptide
  MOD_RES (1), (3), (40): Xaa is C or S
  MOD_RES (16), (17), (18), (19), (20): Xaa is A or G
  MOD_RES (21), (22), (23), (24): Xaa is A or G or is absent

SEQ ID NO: 81798 - protein, 34 aa, Artificial Sequence; identical to SEQ ID NO: 17979
  GFR-binding peptide
  MOD_RES (1), (1): Xaa is C or S

SEQ ID NO: 81799 - protein, 39 aa, Artificial Sequence; identical to SEQ ID NO: 17156
  GFR-binding peptide
  MOD_RES (1), (3): Xaa is C or S

SEQ ID NO: 81800 - protein, 38 aa, Artificial Sequence; identical to SEQ ID NO: 49031
  GFR-binding peptide
  MOD_RES (1), (3), (36), (37): Xaa is C or S
  MOD_RES (14), (15), (16), (17), (18): Xaa is A or G
  MOD_RES (19), (20), (21), (22): Xaa is A or G or is absent

SEQ ID NO: 81801 - protein, 43 aa, Artificial Sequence; identical to SEQ ID NO: 17157
  GFR-binding peptide
  MOD_RES (2), (4), (38): Xaa is C or S

SEQ ID NO: 81802 - protein, 41 aa, Artificial Sequence; identical to SEQ ID NO: 49034
  GFR-binding peptide
  MOD_RES (2), (35), (36): Xaa is C or S
  MOD_RES (13), (14), (15), (16), (17): Xaa is A or G
  MOD_RES (18), (19), (20), (21): Xaa is A or G or is absent

SEQ ID NO: 81803 - protein, 39 aa, Artificial Sequence; identical to SEQ ID NO: 17158
  GFR-binding peptide
  MOD_RES (1), (3): Xaa is C or S
  MOD_RES (16), (17), (18), (19), (20): Xaa is A or G
  MOD_RES (21), (22), (23), (24): Xaa is A or G or is absent

SEQ ID NO: 81804 - protein, 41 aa, Artificial Sequence; identical to SEQ ID NO: 17980
  GFR-binding peptide
  MOD_RES (2), (36): Xaa is C or S
  MOD_RES (14), (15), (16), (17), (18): Xaa is A or G
  MOD_RES (19), (20), (21), (22): Xaa is A or G or is absent

SEQ ID NO: 81805 - protein, 37 aa, Artificial Sequence; identical to SEQ ID NO: 17981
  GFR-binding peptide
  MOD_RES (35), (35): Xaa is C or S
  MOD_RES (11), (12), (13), (14), (15): Xaa is A or G
  MOD_RES (16), (17), (18), (19): Xaa is A or G or is absent

SEQ ID NO: 81806 - protein, 35 aa, Artificial Sequence; identical to SEQ ID NO: 47772
  GFR-binding peptide
  MOD_RES (2), (33), (34): Xaa is C or S

SEQ ID NO: 81807 - protein, 37 aa, Artificial Sequence; identical to SEQ ID NO: 49037
  GFR-binding peptide
  MOD_RES (2), (35), (36): Xaa is C or S
  MOD_RES (13), (14), (15), (16), (17): Xaa is A or G
  MOD_RES (18), (19), (20), (21): Xaa is A or G or is absent

SEQ ID NO: 81808 - protein, 40 aa, Artificial Sequence; identical to SEQ ID NO: 17161
  GFR-binding peptide
  MOD_RES (2), (39): Xaa is C or S

SEQ ID NO: 81809 - protein, 41 aa, Artificial Sequence; identical to SEQ ID NO: 17983
  GFR-binding peptide
  MOD_RES (1), (38): Xaa is C or S

SEQ ID NO: 81810 - protein, 35 aa, Artificial Sequence; identical to SEQ ID NO: 17162
  GFR-binding peptide
  MOD_RES (34), (34): Xaa is C or S

SEQ ID NO: 81811 - protein, 41 aa, Artificial Sequence; identical to SEQ ID NO: 17985
  GFR-binding peptide
  MOD_RES (1), (3), (37): Xaa is C or S

SEQ ID NO: 81812 - protein, 36 aa, Artificial Sequence; identical to SEQ ID NO: 17986
  GFR-binding peptide
  MOD_RES (35), (35): Xaa is C or S

SEQ ID NO: 81813 - protein, 40 aa, Artificial Sequence; identical to SEQ ID NO: 46487
  GFR-binding peptide
  MOD_RES (1), (3), (34), (35): Xaa is C or S

SEQ ID NO: 81814 - protein, 39 aa, Artificial Sequence; identical to SEQ ID NO: 17987
  GFR-binding peptide
  MOD_RES (34), (34): Xaa is C or S

SEQ ID NO: 81815 - protein, 42 aa, Artificial Sequence; identical to SEQ ID NO: 47780
  GFR-binding peptide
  MOD_RES (1), (3), (36), (37): Xaa is C or S
  MOD_RES (14), (15), (16), (17), (18): Xaa is A or G
  MOD_RES (19), (20), (21), (22): Xaa is A or G or is absent

SEQ ID NO: 81816 - protein, 35 aa, Artificial Sequence; identical to SEQ ID NO: 17165
  GFR-binding peptide

SEQ ID NO: 81817 - protein, 32 aa, Artificial Sequence; identical to SEQ ID NO: 49048
  GFR-binding peptide
  MOD_RES (1), (32): Xaa is C or S

SEQ ID NO: 81818 - protein, 37 aa, Artificial Sequence; identical to SEQ ID NO: 17989
  GFR-binding peptide
  MOD_RES (35), (35): Xaa is C or S
  MOD_RES (11), (12), (13), (14), (15): Xaa is A or G
  MOD_RES (16), (17), (18), (19): Xaa is A or G or is absent

SEQ ID NO: 81819 - protein, 39 aa, Artificial Sequence; identical to SEQ ID NO: 17990
  GFR-binding peptide
  MOD_RES (2), (39): Xaa is C or S
  MOD_RES (15), (16), (17), (18), (19): Xaa is A or G
  MOD_RES (20), (21), (22), (23): Xaa is A or G or is absent

SEQ ID NO: 81820 - protein, 40 aa, Artificial Sequence; identical to SEQ ID NO: 17991
  GFR-binding peptide
  MOD_RES (1), (35): Xaa is C or S
  MOD_RES (13), (14), (15), (16), (17): Xaa is A or G
  MOD_RES (18), (19), (20), (21): Xaa is A or G or is absent

SEQ ID NO: 81821 - protein, 40 aa, Artificial Sequence; identical to SEQ ID NO: 49051
  GFR-binding peptide
  MOD_RES (1), (34), (35): Xaa is C or S
  MOD_RES (12), (13), (14), (15), (16): Xaa is A or G
  MOD_RES (17), (18), (19), (20): Xaa is A or G or is absent

SEQ ID NO: 81822 - protein, 39 aa, Artificial Sequence; identical to SEQ ID NO: 17168
  GFR-binding peptide
  MOD_RES (1), (3): Xaa is C or S

SEQ ID NO: 81823 - protein, 38 aa, Artificial Sequence; identical to SEQ ID NO: 49056
  GFR-binding peptide
  MOD_RES (1), (32), (33): Xaa is C or S

SEQ ID NO: 81824 - protein, 35 aa, Artificial Sequence; identical to SEQ ID NO: 46497
  GFR-binding peptide
  MOD_RES (33), (34): Xaa is C or S
  MOD_RES (11), (12), (13), (14), (15): Xaa is A or G
  MOD_RES (16), (17), (18), (19): Xaa is A or G or is absent

SEQ ID NO: 81825 - protein, 39 aa, Artificial Sequence; identical to SEQ ID NO: 17992
  GFR-binding peptide
  MOD_RES (36), (36): Xaa is C or S

SEQ ID NO: 81826 - protein, 40 aa, Artificial Sequence; identical to SEQ ID NO: 17169
  GFR-binding peptide
  MOD_RES (2), (4): Xaa is C or S
  MOD_RES (17), (18), (19), (20), (21): Xaa is A or G
  MOD_RES (22), (23), (24), (25): Xaa is A or G or is absent

SEQ ID NO: 81827 - protein, 36 aa, Artificial Sequence; identical to SEQ ID NO: 49058
  GFR-binding peptide
  MOD_RES (1), (3), (36): Xaa is C or S
  MOD_RES (14), (15), (16), (17), (18): Xaa is A or G
  MOD_RES (19), (20), (21), (22): Xaa is A or G or is absent

SEQ ID NO: 81828 - protein, 36 aa, Artificial Sequence; identical to SEQ ID NO: 17170
  GFR-binding peptide
  MOD_RES (2), (36): Xaa is C or S
  MOD_RES (14), (15), (16), (17), (18): Xaa is A or G
  MOD_RES (19), (20), (21), (22): Xaa is A or G or is absent

SEQ ID NO: 81829 - protein, 34 aa, Artificial Sequence; identical to SEQ ID NO: 46509
  GFR-binding peptide
  MOD_RES (2), (33), (34): Xaa is C or S

SEQ ID NO: 81830 - protein, 43 aa, Artificial Sequence; identical to SEQ ID NO: 17993
  GFR-binding peptide
  MOD_RES (2), (4), (41): Xaa is C or S
  MOD_RES (17), (18), (19), (20), (21): Xaa is A or G
  MOD_RES (22), (23), (24), (25): Xaa is A or G or is absent

SEQ ID NO: 81831 - protein, 35 aa, Artificial Sequence; identical to SEQ ID NO: 47793
  GFR-binding peptide
  MOD_RES (31), (32): Xaa is C or S

SEQ ID NO: 81832 - protein, 35 aa, Artificial Sequence; identical to SEQ ID NO: 46512
  GFR-binding peptide
  MOD_RES (1), (32), (33): Xaa is C or S

SEQ ID NO: 81833 - protein, 34 aa, Artificial Sequence; identical to SEQ ID NO: 17175
  GFR-binding peptide
  MOD_RES (1), (1): Xaa is C or S
  MOD_RES (13), (14), (15), (16), (17): Xaa is A or G
  MOD_RES (18), (19), (20), (21): Xaa is A or G or is absent

SEQ ID NO: 81834 - protein, 41 aa, Artificial Sequence; identical to SEQ ID NO: 49075
  GFR-binding peptide
  MOD_RES (2), (4), (37), (38): Xaa is C or S
  MOD_RES (15), (16), (17), (18), (19): Xaa is A or G
  MOD_RES (20), (21), (22), (23): Xaa is A or G or is absent

SEQ ID NO: 81835 - protein, 36 aa, Artificial Sequence; identical to SEQ ID NO: 50313
  GFR-binding peptide
  MOD_RES (2), (4), (35), (36): Xaa is C or S

SEQ ID NO: 81836 - protein, 39 aa, Artificial Sequence; identical to SEQ ID NO: 46519
  GFR-binding peptide
  MOD_RES (1), (3), (34), (35): Xaa is C or S

SEQ ID NO: 81837 - protein, 36 aa, Artificial Sequence; identical to SEQ ID NO: 49077
  GFR-binding peptide
  MOD_RES (2), (33), (34): Xaa is C or S

SEQ ID NO: 81838 - protein, 36 aa, Artificial Sequence; identical to SEQ ID NO: 17177
  GFR-binding peptide
  MOD_RES (36), (36): Xaa is C or S

SEQ ID NO: 81839 - protein, 39 aa, Artificial Sequence; identical to SEQ ID NO: 47797
  GFR-binding peptide
  MOD_RES (2), (4), (35), (36): Xaa is C or S

SEQ ID NO: 81840 - protein, 40 aa, Artificial Sequence; identical to SEQ ID NO: 47798
  GFR-binding peptide
  MOD_RES (1), (3), (36), (37): Xaa is C or S
  MOD_RES (14), (15), (16), (17), (18): Xaa is A or G
  MOD_RES (19), (20), (21), (22): Xaa is A or G or is absent

SEQ ID NO: 81841 - protein, 38 aa, Artificial Sequence; identical to SEQ ID NO: 17178
  GFR-binding peptide
  MOD_RES (34), (34): Xaa is C or S

SEQ ID NO: 81842 - protein, 41 aa, Artificial Sequence; identical to SEQ ID NO: 17995
  GFR-binding peptide
  MOD_RES (1), (35): Xaa is C or S

SEQ ID NO: 81843 - protein, 35 aa, Artificial Sequence; identical to SEQ ID NO: 47804
  GFR-binding peptide
  MOD_RES (2), (35): Xaa is C or S
  MOD_RES (13), (14), (15), (16), (17): Xaa is A or G
  MOD_RES (18), (19), (20), (21): Xaa is A or G or is absent

SEQ ID NO: 81844 - protein, 44 aa, Artificial Sequence; identical to SEQ ID NO: 17997
  GFR-binding peptide
  MOD_RES (1), (3), (40): Xaa is C or S

SEQ ID NO: 81845 - protein, 34 aa, Artificial Sequence; identical to SEQ ID NO: 47809
  GFR-binding peptide
  MOD_RES (1), (34): Xaa is C or S
  MOD_RES (12), (13), (14), (15), (16): Xaa is A or G
  MOD_RES (17), (18), (19), (20): Xaa is A or G or is absent

SEQ ID NO: 81846 - protein, 42 aa, Artificial Sequence; identical to SEQ ID NO: 17998
  GFR-binding peptide
  MOD_RES (1), (38): Xaa is C or S
  MOD_RES (14), (15), (16), (17), (18): Xaa is A or G
  MOD_RES (19), (20), (21), (22): Xaa is A or G or is absent

SEQ ID NO: 81847 - protein, 38 aa, Artificial Sequence; identical to SEQ ID NO: 18000
  GFR-binding peptide
  MOD_RES (2), (4): Xaa is C or S
  MOD_RES (17), (18), (19), (20), (21): Xaa is A or G
  MOD_RES (22), (23), (24), (25): Xaa is A or G or is absent

SEQ ID NO: 81848 - protein, 30 aa, Artificial Sequence; identical to SEQ ID NO: 50331
  GFR-binding peptide

SEQ ID NO: 81849 - protein, 38 aa, Artificial Sequence; identical to SEQ ID NO: 17181
  GFR-binding peptide
  MOD_RES (1), (35): Xaa is C or S

SEQ ID NO: 81850 - protein, 35 aa, Artificial Sequence; identical to SEQ ID NO: 18003
  GFR-binding peptide
  MOD_RES (34), (34): Xaa is C or S
  MOD_RES (12), (13), (14), (15), (16): Xaa is A or G
  MOD_RES (17), (18), (19), (20): Xaa is A or G or is absent

SEQ ID NO: 81851 - protein, 37 aa, Artificial Sequence; identical to SEQ ID NO: 18004
  GFR-binding peptide
  MOD_RES (2), (4): Xaa is C or S

SEQ ID NO: 81852 - protein, 36 aa, Artificial Sequence; identical to SEQ ID NO: 46538
  GFR-binding peptide
  MOD_RES (2), (4): Xaa is C or S
  MOD_RES (15), (16), (17), (18), (19): Xaa is A or G
  MOD_RES (20), (21), (22), (23): Xaa is A or G or is absent

SEQ ID NO: 81853 - protein, 37 aa, Artificial Sequence; identical to SEQ ID NO: 18005
  GFR-binding peptide
  MOD_RES (2), (4): Xaa is C or S
  MOD_RES (16), (17), (18), (19), (20): Xaa is A or G
  MOD_RES (21), (22), (23), (24): Xaa is A or G or is absent

SEQ ID NO: 81854 - protein, 37 aa, Artificial Sequence; identical to SEQ ID NO: 17182
  GFR-binding peptide
  MOD_RES (35), (35): Xaa is C or S

SEQ ID NO: 81855 - protein, 41 aa, Artificial Sequence; identical to SEQ ID NO: 17183
  GFR-binding peptide
  MOD_RES (2), (39): Xaa is C or S

SEQ ID NO: 81856 - protein, 37 aa, Artificial Sequence; identical to SEQ ID NO: 17184
  GFR-binding peptide
  MOD_RES (1), (1): Xaa is C or S
  MOD_RES (14), (15), (16), (17), (18): Xaa is A or G
  MOD_RES (19), (20), (21), (22): Xaa is A or G or is absent

SEQ ID NO: 81857 - protein, 35 aa, Artificial Sequence; identical to SEQ ID NO: 18006
  GFR-binding peptide
  MOD_RES (35), (35): Xaa is C or S
  MOD_RES (11), (12), (13), (14), (15): Xaa is A or G
  MOD_RES (16), (17), (18), (19): Xaa is A or G or is absent

SEQ ID NO: 81858 - protein, 38 aa, Artificial Sequence; identical to SEQ ID NO: 18008
  GFR-binding peptide
  MOD_RES (36), (36): Xaa is C or S
  MOD_RES (12), (13), (14), (15), (16): Xaa is A or G
  MOD_RES (17), (18), (19), (20): Xaa is A or G or is absent

SEQ ID NO: 81859 - protein, 41 aa, Artificial Sequence; identical to SEQ ID NO: 18009
  GFR-binding peptide
  MOD_RES (1), (3), (40): Xaa is C or S

SEQ ID NO: 81860 - protein, 33 aa, Artificial Sequence; identical to SEQ ID NO: 50345
  GFR-binding peptide
  MOD_RES (31), (32): Xaa is C or S

SEQ ID NO: 81861 - protein, 38 aa, Artificial Sequence; identical to SEQ ID NO: 17187
  GFR-binding peptide
  MOD_RES (2), (4), (38): Xaa is C or S
  MOD_RES (16), (17), (18), (19), (20): Xaa is A or G
  MOD_RES (21), (22), (23), (24): Xaa is A or G or is absent

SEQ ID NO: 81862 - protein, 37 aa, Artificial Sequence; identical to SEQ ID NO: 50346
  GFR-binding peptide
  MOD_RES (2), (33), (34): Xaa is C or S

SEQ ID NO: 81863 - protein, 41 aa, Artificial Sequence; identical to SEQ ID NO: 50347
  GFR-binding peptide
  MOD_RES (1), (3), (36), (37): Xaa is C or S
  MOD_RES (14), (15), (16), (17), (18): Xaa is A or G
  MOD_RES (19), (20), (21), (22): Xaa is A or G or is absent

SEQ ID NO: 81864 - protein, 43 aa, Artificial Sequence; identical to SEQ ID NO: 49099
  GFR-binding peptide
  MOD_RES (2), (4), (37), (38): Xaa is C or S
  MOD_RES (15), (16), (17), (18), (19): Xaa is A or G
  MOD_RES (20), (21), (22), (23): Xaa is A or G or is absent

SEQ ID NO: 81865 - protein, 39 aa, Artificial Sequence; identical to SEQ ID NO: 17188
  GFR-binding peptide
  MOD_RES (2), (36): Xaa is C or S

SEQ ID NO: 81866 - protein, 34 aa, Artificial Sequence; identical to SEQ ID NO: 18010
  GFR-binding peptide
  MOD_RES (12), (13), (14), (15), (16): Xaa is A or G
  MOD_RES (17), (18), (19), (20): Xaa is A or G or is absent

SEQ ID NO: 81867 - protein, 35 aa, Artificial Sequence; identical to SEQ ID NO: 18011
  GFR-binding peptide
  MOD_RES (35), (35): Xaa is C or S
  MOD_RES (11), (12), (13), (14), (15): Xaa is A or G
  MOD_RES (16), (17), (18), (19): Xaa is A or G or is absent

SEQ ID NO: 81868 - protein, 35 aa, Artificial Sequence; identical to SEQ ID NO: 46548
  GFR-binding peptide
  MOD_RES (31), (32): Xaa is C or S

SEQ ID NO: 81869 - protein, 38 aa, Artificial Sequence; identical to SEQ ID NO: 18012
  GFR-binding peptide
  MOD_RES (1), (38): Xaa is C or S

SEQ ID NO: 81870 - protein, 36 aa, Artificial Sequence; identical to SEQ ID NO: 17190
  GFR-binding peptide
  MOD_RES (33), (33): Xaa is C or S
  MOD_RES (11), (12), (13), (14), (15): Xaa is A or G
  MOD_RES (16), (17), (18), (19): Xaa is A or G or is absent

SEQ ID NO: 81871 - protein, 33 aa, Artificial Sequence; identical to SEQ ID NO: 18014
  GFR-binding peptide

SEQ ID NO: 81872 - protein, 32 aa, Artificial Sequence; identical to SEQ ID NO: 46553
  GFR-binding peptide
  MOD_RES (31), (32): Xaa is C or S

SEQ ID NO: 81873 - protein, 42 aa, Artificial Sequence; identical to SEQ ID NO: 18015
  GFR-binding peptide
  MOD_RES (1), (3), (40): Xaa is C or S
  MOD_RES (16), (17), (18), (19), (20): Xaa is A or G
  MOD_RES (21), (22), (23), (24): Xaa is A or G or is absent

SEQ ID NO: 81874 - protein, 36 aa, Artificial Sequence; identical to SEQ ID NO: 17191
  GFR-binding peptide
  MOD_RES (1), (3): Xaa is C or S
  MOD_RES (15), (16), (17), (18), (19): Xaa is A or G
  MOD_RES (20), (21), (22), (23): Xaa is A or G or is absent

SEQ ID NO: 81875 - protein, 41 aa, Artificial Sequence; identical to SEQ ID NO: 18016
  GFR-binding peptide
  MOD_RES (2), (4), (41): Xaa is C or S

SEQ ID NO: 81876 - protein, 41 aa, Artificial Sequence; identical to SEQ ID NO: 18017
  GFR-binding peptide
  MOD_RES (1), (38): Xaa is C or S

SEQ ID NO: 81877 - protein, 42 aa, Artificial Sequence; identical to SEQ ID NO: 47829
  GFR-binding peptide
  MOD_RES (2), (4), (37), (38): Xaa is C or S
  MOD_RES (15), (16), (17), (18), (19): Xaa is A or G
  MOD_RES (20), (21), (22), (23): Xaa is A or G or is absent

SEQ ID NO: 81878 - protein, 39 aa, Artificial Sequence; identical to SEQ ID NO: 50359
  GFR-binding peptide
  MOD_RES (33), (34): Xaa is C or S
  MOD_RES (11), (12), (13), (14), (15): Xaa is A or G
  MOD_RES (16), (17), (18), (19): Xaa is A or G or is absent

SEQ ID NO: 81879 - protein, 32 aa, Artificial Sequence; identical to SEQ ID NO: 49108
  GFR-binding peptide
  MOD_RES (31), (32): Xaa is C or S

SEQ ID NO: 81880 - protein, 38 aa, Artificial Sequence; identical to SEQ ID NO: 18018
  GFR-binding peptide
  MOD_RES (1), (38): Xaa is C or S
  MOD_RES (14), (15), (16), (17), (18): Xaa is A or G
  MOD_RES (19), (20), (21), (22): Xaa is A or G or is absent

SEQ ID NO: 81881 - protein, 42 aa, Artificial Sequence; identical to SEQ ID NO: 18019
  GFR-binding peptide
  MOD_RES (2), (39): Xaa is C or S

SEQ ID NO: 81882 - protein, 36 aa, Artificial Sequence; identical to SEQ ID NO: 18020
  GFR-binding peptide
  MOD_RES (33), (33): Xaa is C or S
  MOD_RES (11), (12), (13), (14), (15): Xaa is A or G
  MOD_RES (16), (17), (18), (19): Xaa is A or G or is absent

SEQ ID NO: 81883 - protein, 41 aa, Artificial Sequence; identical to SEQ ID NO: 17195
  GFR-binding peptide
  MOD_RES (2), (39): Xaa is C or S
  MOD_RES (15), (16), (17), (18), (19): Xaa is A or G
  MOD_RES (20), (21), (22), (23): Xaa is A or G or is absent

SEQ ID NO: 81884 - protein, 40 aa, Artificial Sequence; identical to SEQ ID NO: 17196
  GFR-binding peptide
  MOD_RES (2), (39): Xaa is C or S
  MOD_RES (15), (16), (17), (18), (19): Xaa is A or G
  MOD_RES (20), (21), (22), (23): Xaa is A or G or is absent

SEQ ID NO: 81885 - protein, 43 aa, Artificial Sequence; identical to SEQ ID NO: 17197
  GFR-binding peptide
  MOD_RES (2), (39): Xaa is C or S

SEQ ID NO: 81886 - protein, 42 aa, Artificial Sequence; identical to SEQ ID NO: 46560
  GFR-binding peptide
  MOD_RES (1), (3), (36), (37): Xaa is C or S
  MOD_RES (14), (15), (16), (17), (18): Xaa is A or G
  MOD_RES (19), (20), (21), (22): Xaa is A or G or is absent

SEQ ID NO: 81887 - protein, 39 aa, Artificial Sequence; identical to SEQ ID NO: 17198
  GFR-binding peptide
  MOD_RES (1), (35): Xaa is C or S

SEQ ID NO: 81888 - protein, 37 aa, Artificial Sequence; identical to SEQ ID NO: 17199
  GFR-binding peptide
  MOD_RES (35), (35): Xaa is C or S

SEQ ID NO: 81889 - protein, 40 aa, Artificial Sequence; identical to SEQ ID NO: 47837
  GFR-binding peptide
  MOD_RES (1), (3), (36), (37): Xaa is C or S
  MOD_RES (14), (15), (16), (17), (18): Xaa is A or G
  MOD_RES (19), (20), (21), (22): Xaa is A or G or is absent

SEQ ID NO: 81890 - protein, 34 aa, Artificial Sequence; identical to SEQ ID NO: 18025
  GFR-binding peptide
  MOD_RES (1), (1): Xaa is C or S

SEQ ID NO: 81891 - protein, 35 aa, Artificial Sequence; identical to SEQ ID NO: 17200
  GFR-binding peptide
  MOD_RES (1), (1): Xaa is C or S
  MOD_RES (14), (15), (16), (17), (18): Xaa is A or G
  MOD_RES (19), (20), (21), (22): Xaa is A or G or is absent

SEQ ID NO: 81892 - protein, 38 aa, Artificial Sequence; identical to SEQ ID NO: 17201
  GFR-binding peptide
  MOD_RES (1), (38): Xaa is C or S

SEQ ID NO: 81893 - protein, 40 aa, Artificial Sequence; identical to SEQ ID NO: 50369
  GFR-binding peptide
  MOD_RES (2), (4), (35), (36): Xaa is C or S

SEQ ID NO: 81894 - protein, 41 aa, Artificial Sequence; identical to SEQ ID NO: 18026
  GFR-binding peptide
  MOD_RES (2), (4), (38): Xaa is C or S
  MOD_RES (16), (17), (18), (19), (20): Xaa is A or G
  MOD_RES (21), (22), (23), (24): Xaa is A or G or is absent

SEQ ID NO: 81895 - protein, 38 aa, Artificial Sequence; identical to SEQ ID NO: 18029
  GFR-binding peptide
  MOD_RES (2), (4), (38): Xaa is C or S

SEQ ID NO: 81896 - protein, 37 aa, Artificial Sequence; identical to SEQ ID NO: 18030
  GFR-binding peptide
  MOD_RES (2), (2): Xaa is C or S

SEQ ID NO: 81897 - protein, 34 aa, Artificial Sequence; identical to SEQ ID NO: 50378
  GFR-binding peptide
  MOD_RES (2), (33), (34): Xaa is C or S

SEQ ID NO: 81898 - protein, 37 aa, Artificial Sequence; identical to SEQ ID NO: 50379
  GFR-binding peptide
  MOD_RES (1), (32), (33): Xaa is C or S

SEQ ID NO: 81899 - protein, 31 aa, Artificial Sequence; identical to SEQ ID NO: 46566
  GFR-binding peptide
  MOD_RES (1), (1): Xaa is C or S

SEQ ID NO: 81900 - protein, 35 aa, Artificial Sequence; identical to SEQ ID NO: 49124
  GFR-binding peptide
  MOD_RES (2), (4), (35): Xaa is C or S

SEQ ID NO: 81901 - protein, 35 aa, Artificial Sequence; identical to SEQ ID NO: 18031
  GFR-binding peptide
  MOD_RES (1), (1): Xaa is C or S
  MOD_RES (14), (15), (16), (17), (18): Xaa is A or G
  MOD_RES (19), (20), (21), (22): Xaa is A or G or is absent

SEQ ID NO: 81902 - protein, 32 aa, Artificial Sequence; identical to SEQ ID NO: 46568
  GFR-binding peptide
  MOD_RES (11), (12), (13), (14), (15): Xaa is A or G
  MOD_RES (16), (17), (18), (19): Xaa is A or G or is absent

SEQ ID NO: 81903 - protein, 41 aa, Artificial Sequence; identical to SEQ ID NO: 17204
  GFR-binding peptide
  MOD_RES (2), (39): Xaa is C or S
  MOD_RES (15), (16), (17), (18), (19): Xaa is A or G
  MOD_RES (20), (21), (22), (23): Xaa is A or G or is absent

SEQ ID NO: 81904 - protein, 36 aa, Artificial Sequence; identical to SEQ ID NO: 17205
  GFR-binding peptide
  MOD_RES (36), (36): Xaa is C or S
  MOD_RES (12), (13), (14), (15), (16): Xaa is A or G
  MOD_RES (17), (18), (19), (20): Xaa is A or G or is absent

SEQ ID NO: 81905 - protein, 43 aa, Artificial Sequence; identical to SEQ ID NO: 47846
  GFR-binding peptide
  MOD_RES (2), (4), (37), (38): Xaa is C or S
  MOD_RES (15), (16), (17), (18), (19): Xaa is A or G
  MOD_RES (20), (21), (22), (23): Xaa is A or G or is absent

SEQ ID NO: 81906 - protein, 39 aa, Artificial Sequence; identical to SEQ ID NO: 46576
  GFR-binding peptide
  MOD_RES (1), (34), (35): Xaa is C or S
  MOD_RES (12), (13), (14), (15), (16): Xaa is A or G
  MOD_RES (17), (18), (19), (20): Xaa is A or G or is absent

SEQ ID NO: 81907 - protein, 34 aa, Artificial Sequence; identical to SEQ ID NO: 46577
  GFR-binding peptide
  MOD_RES (31), (32): Xaa is C or S

SEQ ID NO: 81908 - protein, 33 aa, Artificial Sequence; identical to SEQ ID NO: 17208
  GFR-binding peptide
  MOD_RES (33), (33): Xaa is C or S

SEQ ID NO: 81909 - protein, 37 aa, Artificial Sequence; identical to SEQ ID NO: 49131
  GFR-binding peptide
  MOD_RES (2), (33), (34): Xaa is C or S

SEQ ID NO: 81910 - protein, 37 aa, Artificial Sequence; identical to SEQ ID NO: 17209
  GFR-binding peptide
  MOD_RES (37), (37): Xaa is C or S
  MOD_RES (13), (14), (15), (16), (17): Xaa is A or G
  MOD_RES (18), (19), (20), (21): Xaa is A or G or is absent

SEQ ID NO: 81911 - protein, 42 aa, Artificial Sequence; identical to SEQ ID NO: 17211
  GFR-binding peptide
  MOD_RES (1), (38): Xaa is C or S

SEQ ID NO: 81912 - protein, 32 aa, Artificial Sequence; identical to SEQ ID NO: 46585
  GFR-binding peptide
  MOD_RES (11), (12), (13), (14), (15): Xaa is A or G
  MOD_RES (16), (17), (18), (19): Xaa is A or G or is absent

SEQ ID NO: 81913 - protein, 41 aa, Artificial Sequence; identical to SEQ ID NO: 17212
  GFR-binding peptide
  MOD_RES (2), (36): Xaa is C or S

SEQ ID NO: 81914 - protein, 32 aa, Artificial Sequence; identical to SEQ ID NO: 47853
  GFR-binding peptide
  MOD_RES (11), (12), (13), (14), (15): Xaa is A or G
  MOD_RES (16), (17), (18), (19): Xaa is A or G or is absent

SEQ ID NO: 81915 - protein, 38 aa, Artificial Sequence; identical to SEQ ID NO: 18035
  GFR-binding peptide
  MOD_RES (2), (36): Xaa is C or S

SEQ ID NO: 81916 - protein, 42 aa, Artificial Sequence; identical to SEQ ID NO: 17215
  GFR-binding peptide
  MOD_RES (2), (36): Xaa is C or S

SEQ ID NO: 81917 - protein, 43 aa, Artificial Sequence; identical to SEQ ID NO: 18037
  GFR-binding peptide
  MOD_RES (1), (3), (37): Xaa is C or S
  MOD_RES (15), (16), (17), (18), (19): Xaa is A or G
  MOD_RES (20), (21), (22), (23): Xaa is A or G or is absent

SEQ ID NO: 81918 - protein, 37 aa, Artificial Sequence; identical to SEQ ID NO: 18038
  GFR-binding peptide
  MOD_RES (1), (3): Xaa is C or S

SEQ ID NO: 81919 - protein, 34 aa, Artificial Sequence; identical to SEQ ID NO: 50399
  GFR-binding peptide
  MOD_RES (1), (34): Xaa is C or S
  MOD_RES (12), (13), (14), (15), (16): Xaa is A or G
  MOD_RES (17), (18), (19), (20): Xaa is A or G or is absent

SEQ ID NO: 81920 - protein, 39 aa, Artificial Sequence; identical to SEQ ID NO: 47860
  GFR-binding peptide
  MOD_RES (1), (3), (36), (37): Xaa is C or S
  MOD_RES (14), (15), (16), (17), (18): Xaa is A or G
  MOD_RES (19), (20), (21), (22): Xaa is A or G or is absent

SEQ ID NO: 81921 - protein, 39 aa, Artificial Sequence; identical to SEQ ID NO: 18041
  GFR-binding peptide
  MOD_RES (37), (37): Xaa is C or S
  MOD_RES (13), (14), (15), (16), (17): Xaa is A or G
  MOD_RES (18), (19), (20), (21): Xaa is A or G or is absent

SEQ ID NO: 81922 - protein, 39 aa, Artificial Sequence; identical to SEQ ID NO: 18043
  GFR-binding peptide
  MOD_RES (2), (4), (38): Xaa is C or S

SEQ ID NO: 81923 - protein, 43 aa, Artificial Sequence; identical to SEQ ID NO: 17219
  GFR-binding peptide
  MOD_RES (2), (4), (38): Xaa is C or S
  MOD_RES (16), (17), (18), (19), (20): Xaa is A or G
  MOD_RES (21), (22), (23), (24): Xaa is A or G or is absent

SEQ ID NO: 81924 - protein, 36 aa, Artificial Sequence; identical to SEQ ID NO: 18045
  GFR-binding peptide
  MOD_RES (1), (3): Xaa is C or S

SEQ ID NO: 81925 - protein, 44 aa, Artificial Sequence; identical to SEQ ID NO: 17220
  GFR-binding peptide
  MOD_RES (2), (4), (41): Xaa is C or S
  MOD_RES (17), (18), (19), (20), (21): Xaa is A or G
  MOD_RES (22), (23), (24), (25): Xaa is A or G or is absent

SEQ ID NO: 81926 - protein, 36 aa, Artificial Sequence; identical to SEQ ID NO: 17221
  GFR-binding peptide
  MOD_RES (1), (3): Xaa is C or S

SEQ ID NO: 81927 - protein, 38 aa, Artificial Sequence; identical to SEQ ID NO: 18048
  GFR-binding peptide
  MOD_RES (35), (35): Xaa is C or S
  MOD_RES (11), (12), (13), (14), (15): Xaa is A or G
  MOD_RES (16), (17), (18), (19): Xaa is A or G or is absent

SEQ ID NO: 81928 - protein, 43 aa, Artificial Sequence; identical to SEQ ID NO: 17225
  GFR-binding peptide
  MOD_RES (1), (3), (37): Xaa is C or S
  MOD_RES (15), (16), (17), (18), (19): Xaa is A or G
  MOD_RES (20), (21), (22), (23): Xaa is A or G or is absent

SEQ ID NO: 81929 - protein, 38 aa, Artificial Sequence; identical to SEQ ID NO: 18049
  GFR-binding peptide
  MOD_RES (37), (37): Xaa is C or S

SEQ ID NO: 81930 - protein, 39 aa, Artificial Sequence; identical to SEQ ID NO: 18051
  GFR-binding peptide
  MOD_RES (37), (37): Xaa is C or S
  MOD_RES (13), (14), (15), (16), (17): Xaa is A or G
  MOD_RES (18), (19), (20), (21): Xaa is A or G or is absent

SEQ ID NO: 81931 - protein, 34 aa, Artificial Sequence; identical to SEQ ID NO: 50411
  GFR-binding peptide
  MOD_RES (1), (32), (33): Xaa is C or S

SEQ ID NO: 81932 - protein, 37 aa, Artificial Sequence; identical to SEQ ID NO: 17228
  GFR-binding peptide
  MOD_RES (35), (35): Xaa is C or S
  MOD_RES (11), (12), (13), (14), (15): Xaa is A or G
  MOD_RES (16), (17), (18), (19): Xaa is A or G or is absent

SEQ ID NO: 81933 - protein, 39 aa, Artificial Sequence; identical to SEQ ID NO: 18052
  GFR-binding peptide
  MOD_RES (1), (35): Xaa is C or S
  MOD_RES (13), (14), (15), (16), (17): Xaa is A or G
  MOD_RES (18), (19), (20), (21): Xaa is A or G or is absent

SEQ ID NO: 81934 - protein, 35 aa, Artificial Sequence; identical to SEQ ID NO: 46609
  GFR-binding peptide
  MOD_RES (2), (33), (34): Xaa is C or S

SEQ ID NO: 81935 - protein, 37 aa, Artificial Sequence; identical to SEQ ID NO: 17230
  GFR-binding peptide
  MOD_RES (35), (35): Xaa is C or S
  MOD_RES (11), (12), (13), (14), (15): Xaa is A or G
  MOD_RES (16), (17), (18), (19): Xaa is A or G or is absent

SEQ ID NO: 81936 - protein, 44 aa, Artificial Sequence; identical to SEQ ID NO: 18053
  GFR-binding peptide
  MOD_RES (2), (4), (38): Xaa is C or S
  MOD_RES (16), (17), (18), (19), (20): Xaa is A or G
  MOD_RES (21), (22), (23), (24): Xaa is A or G or is absent

SEQ ID NO: 81937 - protein, 42 aa, Artificial Sequence; identical to SEQ ID NO: 18054
  GFR-binding peptide
  MOD_RES (2), (36): Xaa is C or S
  MOD_RES (14), (15), (16), (17), (18): Xaa is A or G
  MOD_RES (19), (20), (21), (22): Xaa is A or G or is absent

SEQ ID NO: 81938 - protein, 39 aa, Artificial Sequence; identical to SEQ ID NO: 18055
  GFR-binding peptide
  MOD_RES (1), (38): Xaa is C or S
  MOD_RES (14), (15), (16), (17), (18): Xaa is A or G
  MOD_RES (19), (20), (21), (22): Xaa is A or G or is absent

SEQ ID NO: 81939 - protein, 32 aa, Artificial Sequence; identical to SEQ ID NO: 18056
  GFR-binding peptide

SEQ ID NO: 81940 - protein, 34 aa, Artificial Sequence; identical to SEQ ID NO: 50413
  GFR-binding peptide
  MOD_RES (2), (2): Xaa is C or S
  MOD_RES (13), (14), (15), (16), (17): Xaa is A or G
  MOD_RES (18), (19), (20), (21): Xaa is A or G or is absent

SEQ ID NO: 81941 - protein, 44 aa, Artificial Sequence; identical to SEQ ID NO: 18057
  GFR-binding peptide
  MOD_RES (2), (4), (41): Xaa is C or S

SEQ ID NO: 81942 - protein, 35 aa, Artificial Sequence; identical to SEQ ID NO: 46614
  GFR-binding peptide
  MOD_RES (2), (33), (34): Xaa is C or S

SEQ ID NO: 81943 - protein, 41 aa, Artificial Sequence; identical to SEQ ID NO: 17233
  GFR-binding peptide
  MOD_RES (2), (39): Xaa is C or S

SEQ ID NO: 81944 - protein, 33 aa, Artificial Sequence; identical to SEQ ID NO: 18059
  GFR-binding peptide
  MOD_RES (12), (13), (14), (15), (16): Xaa is A or G
  MOD_RES (17), (18), (19), (20): Xaa is A or G or is absent

SEQ ID NO: 81945 - protein, 34 aa, Artificial Sequence; identical to SEQ ID NO: 17234
  GFR-binding peptide
  MOD_RES (33), (33): Xaa is C or S
  MOD_RES (11), (12), (13), (14), (15): Xaa is A or G
  MOD_RES (16), (17), (18), (19): Xaa is A or G or is absent

SEQ ID NO: 81946 - protein, 30 aa, Artificial Sequence; identical to SEQ ID NO: 46616
  GFR-binding peptide

SEQ ID NO: 81947 - protein, 40 aa, Artificial Sequence; identical to SEQ ID NO: 17237
  GFR-binding peptide
  MOD_RES (36), (36): Xaa is C or S

SEQ ID NO: 81948 - protein, 36 aa, Artificial Sequence; identical to SEQ ID NO: 18061
  GFR-binding peptide
  MOD_RES (13), (14), (15), (16), (17): Xaa is A or G
  MOD_RES (18), (19), (20), (21): Xaa is A or G or is absent

SEQ ID NO: 81949 - protein, 39 aa, Artificial Sequence; identical to SEQ ID NO: 49167
  GFR-binding peptide
  MOD_RES (1), (3), (34), (35): Xaa is C or S

SEQ ID NO: 81950 - protein, 40 aa, Artificial Sequence; identical to SEQ ID NO: 17238
  GFR-binding peptide
  MOD_RES (2), (36): Xaa is C or S

SEQ ID NO: 81951 - protein, 37 aa, Artificial Sequence; identical to SEQ ID NO: 18066
  GFR-binding peptide
  MOD_RES (2), (36): Xaa is C or S
  MOD_RES (14), (15), (16), (17), (18): Xaa is A or G
  MOD_RES (19), (20), (21), (22): Xaa is A or G or is absent

SEQ ID NO: 81952 - protein, 39 aa, Artificial Sequence; identical to SEQ ID NO: 17241
  GFR-binding peptide
  MOD_RES (34), (34): Xaa is C or S
  MOD_RES (12), (13), (14), (15), (16): Xaa is A or G
  MOD_RES (17), (18), (19), (20): Xaa is A or G or is absent

SEQ ID NO: 81953 - protein, 39 aa, Artificial Sequence; identical to SEQ ID NO: 50423
  GFR-binding peptide
  MOD_RES (2), (35), (36): Xaa is C or S
  MOD_RES (13), (14), (15), (16), (17): Xaa is A or G
  MOD_RES (18), (19), (20), (21): Xaa is A or G or is absent

SEQ ID NO: 81954 - protein, 36 aa, Artificial Sequence; identical to SEQ ID NO: 18067
  GFR-binding peptide
  MOD_RES (2), (2): Xaa is C or S

SEQ ID NO: 81955 - protein, 37 aa, Artificial Sequence; identical to SEQ ID NO: 17242
  GFR-binding peptide
  MOD_RES (1), (35): Xaa is C or S
  MOD_RES (13), (14), (15), (16), (17): Xaa is A or G
  MOD_RES (18), (19), (20), (21): Xaa is A or G or is absent

SEQ ID NO: 81956 - protein, 42 aa, Artificial Sequence; identical to SEQ ID NO: 18068
  GFR-binding peptide
  MOD_RES (2), (4), (41): Xaa is C or S
  MOD_RES (17), (18), (19), (20), (21): Xaa is A or G
  MOD_RES (22), (23), (24), (25): Xaa is A or G or is absent

SEQ ID NO: 81957 - protein, 36 aa, Artificial Sequence; identical to SEQ ID NO: 47885
  GFR-binding peptide
  MOD_RES (2), (4): Xaa is C or S
  MOD_RES (15), (16), (17), (18), (19): Xaa is A or G
  MOD_RES (20), (21), (22), (23): Xaa is A or G or is absent

SEQ ID NO: 81958 - protein, 34 aa, Artificial Sequence; identical to SEQ ID NO: 17244
  GFR-binding peptide
  MOD_RES (1), (1): Xaa is C or S
  MOD_RES (13), (14), (15), (16), (17): Xaa is A or G
  MOD_RES (18), (19), (20), (21): Xaa is A or G or is absent

SEQ ID NO: 81959 - protein, 38 aa, Artificial Sequence; identical to SEQ ID NO: 18069
  GFR-binding peptide
  MOD_RES (35), (35): Xaa is C or S
  MOD_RES (11), (12), (13), (14), (15): Xaa is A or G
  MOD_RES (16), (17), (18), (19): Xaa is A or G or is absent

SEQ ID NO: 81960 - protein, 39 aa, Artificial Sequence; identical to SEQ ID NO: 17245
  GFR-binding peptide
  MOD_RES (1), (35): Xaa is C or S

SEQ ID NO: 81961 - protein, 37 aa, Artificial Sequence; identical to SEQ ID NO: 18070
  GFR-binding peptide
  MOD_RES (1), (35): Xaa is C or S

SEQ ID NO: 81962 - protein, 35 aa, Artificial Sequence; identical to SEQ ID NO: 46634
  GFR-binding peptide
  MOD_RES (1), (34), (35): Xaa is C or S
  MOD_RES (12), (13), (14), (15), (16): Xaa is A or G
  MOD_RES (17), (18), (19), (20): Xaa is A or G or is absent

SEQ ID NO: 81963 - protein, 39 aa, Artificial Sequence; identical to SEQ ID NO: 17246
  GFR-binding peptide
  MOD_RES (36), (36): Xaa is C or S

SEQ ID NO: 81964 - protein, 37 aa, Artificial Sequence; identical to SEQ ID NO: 17248
  GFR-binding peptide
  MOD_RES (2), (36): Xaa is C or S

SEQ ID NO: 81965 - protein, 36 aa, Artificial Sequence; identical to SEQ ID NO: 50441
  GFR-binding peptide
  MOD_RES (2), (4), (35), (36): Xaa is C or S

SEQ ID NO: 81966 - protein, 40 aa, Artificial Sequence; identical to SEQ ID NO: 18071
  GFR-binding peptide
  MOD_RES (2), (4), (38): Xaa is C or S
  MOD_RES (16), (17), (18), (19), (20): Xaa is A or G
  MOD_RES (21), (22), (23), (24): Xaa is A or G or is absent

SEQ ID NO: 81967 - protein, 39 aa, Artificial Sequence; identical to SEQ ID NO: 47892
  GFR-binding peptide
  MOD_RES (2), (35), (36): Xaa is C or S
  MOD_RES (13), (14), (15), (16), (17): Xaa is A or G
  MOD_RES (18), (19), (20), (21): Xaa is A or G or is absent

SEQ ID NO: 81968 - protein, 37 aa, Artificial Sequence; identical to SEQ ID NO: 18072
  GFR-binding peptide
  MOD_RES (33), (33): Xaa is C or S
  MOD_RES (11), (12), (13), (14), (15): Xaa is A or G
  MOD_RES (16), (17), (18), (19): Xaa is A or G or is absent

SEQ ID NO: 81969 - protein, 38 aa, Artificial Sequence; identical to SEQ ID NO: 46639
  GFR-binding peptide
  MOD_RES (2), (35), (36): Xaa is C or S
  MOD_RES (13), (14), (15), (16), (17): Xaa is A or G
  MOD_RES (18), (19), (20), (21): Xaa is A or G or is absent

SEQ ID NO: 81970 - protein, 40 aa, Artificial Sequence; identical to SEQ ID NO: 47894
  GFR-binding peptide
  MOD_RES (1), (34), (35): Xaa is C or S
  MOD_RES (12), (13), (14), (15), (16): Xaa is A or G
  MOD_RES (17), (18), (19), (20): Xaa is A or G or is absent

SEQ ID NO: 81971 - protein, 32 aa, Artificial Sequence; identical to SEQ ID NO: 50444
  GFR-binding peptide
  MOD_RES (2), (2): Xaa is C or S

SEQ ID NO: 81972 - protein, 37 aa, Artificial Sequence; identical to SEQ ID NO: 17251
  GFR-binding peptide
  MOD_RES (2), (36): Xaa is C or S
  MOD_RES (14), (15), (16), (17), (18): Xaa is A or G
  MOD_RES (19), (20), (21), (22): Xaa is A or G or is absent

SEQ ID NO: 81973 - protein, 35 aa, Artificial Sequence; identical to SEQ ID NO: 50450
  GFR-binding peptide
  MOD_RES (2), (35): Xaa is C or S
  MOD_RES (13), (14), (15), (16), (17): Xaa is A or G
  MOD_RES (18), (19), (20), (21): Xaa is A or G or is absent

SEQ ID NO: 81974 - protein, 41 aa, Artificial Sequence; identical to SEQ ID NO: 18074
  GFR-binding peptide
  MOD_RES (1), (38): Xaa is C or S

SEQ ID NO: 81975 - protein, 39 aa, Artificial Sequence; identical to SEQ ID NO: 17255
  GFR-binding peptide
  MOD_RES (33), (33): Xaa is C or S
  MOD_RES (11), (12), (13), (14), (15): Xaa is A or G
  MOD_RES (16), (17), (18), (19): Xaa is A or G or is absent

SEQ ID NO: 81976 - protein, 36 aa, Artificial Sequence; identical to SEQ ID NO: 47900
  GFR-binding peptide
  MOD_RES (1), (32), (33): Xaa is C or S

SEQ ID NO: 81977 - protein, 40 aa, Artificial Sequence; identical to SEQ ID NO: 49195
  GFR-binding peptide
  MOD_RES (2), (4), (35), (36): Xaa is C or S

SEQ ID NO: 81978 - protein, 43 aa, Artificial Sequence; identical to SEQ ID NO: 18075
  GFR-binding peptide
  MOD_RES (2), (4), (41): Xaa is C or S

SEQ ID NO: 81979 - protein, 39 aa, Artificial Sequence; identical to SEQ ID NO: 18076
  GFR-binding peptide
  MOD_RES (33), (33): Xaa is C or S
  MOD_RES (11), (12), (13), (14), (15): Xaa is A or G
  MOD_RES (16), (17), (18), (19): Xaa is A or G or is absent

SEQ ID NO: 81980 - protein, 36 aa, Artificial Sequence; identical to SEQ ID NO: 49197
  GFR-binding peptide
  MOD_RES (1), (34), (35): Xaa is C or S
  MOD_RES (12), (13), (14), (15), (16): Xaa is A or G
  MOD_RES (17), (18), (19), (20): Xaa is A or G or is absent

SEQ ID NO: 81981 - protein, 40 aa, Artificial Sequence; identical to SEQ ID NO: 17256
  GFR-binding peptide
  MOD_RES (34), (34): Xaa is C or S
  MOD_RES (12), (13), (14), (15), (16): Xaa is A or G
  MOD_RES (17), (18), (19), (20): Xaa is A or G or is absent

SEQ ID NO: 81982 - protein, 35 aa, Artificial Sequence; identical to SEQ ID NO: 47909
  GFR-binding peptide
  MOD_RES (1), (3): Xaa is C or S
  MOD_RES (14), (15), (16), (17), (18): Xaa is A or G
  MOD_RES (19), (20), (21), (22): Xaa is A or G or is absent

SEQ ID NO: 81983 - protein, 40 aa, Artificial Sequence; identical to SEQ ID NO: 18077
  GFR-binding peptide
  MOD_RES (1), (3), (37): Xaa is C or S

SEQ ID NO: 81984 - protein, 39 aa, Artificial Sequence; identical to SEQ ID NO: 17259
  GFR-binding peptide
  MOD_RES (37), (37): Xaa is C or S

SEQ ID NO: 81985 - protein, 37 aa, Artificial Sequence; identical to SEQ ID NO: 46652
  GFR-binding peptide
  MOD_RES (2), (35), (36): Xaa is C or S
  MOD_RES (13), (14), (15), (16), (17): Xaa is A or G
  MOD_RES (18), (19), (20), (21): Xaa is A or G or is absent

SEQ ID NO: 81986 - protein, 39 aa, Artificial Sequence; identical to SEQ ID NO: 18078
  GFR-binding peptide
  MOD_RES (1), (35): Xaa is C or S
  MOD_RES (13), (14), (15), (16), (17): Xaa is A or G
  MOD_RES (18), (19), (20), (21): Xaa is A or G or is absent

SEQ ID NO: 81987 - protein, 40 aa, Artificial Sequence; identical to SEQ ID NO: 17260
  GFR-binding peptide
  MOD_RES (37), (37): Xaa is C or S

SEQ ID NO: 81988 - protein, 34 aa, Artificial Sequence; identical to SEQ ID NO: 17261
  GFR-binding peptide
  MOD_RES (34), (34): Xaa is C or S
  MOD_RES (12), (13), (14), (15), (16): Xaa is A or G
  MOD_RES (17), (18), (19), (20): Xaa is A or G or is absent

SEQ ID NO: 81989 - protein, 35 aa, Artificial Sequence; identical to SEQ ID NO: 49205
  GFR-binding peptide
  MOD_RES (1), (34), (35): Xaa is C or S
  MOD_RES (12), (13), (14), (15), (16): Xaa is A or G
  MOD_RES (17), (18), (19), (20): Xaa is A or G or is absent

SEQ ID NO: 81990 - protein, 33 aa, Artificial Sequence; identical to SEQ ID NO: 49206
  GFR-binding peptide
  MOD_RES (1), (3): Xaa is C or S

SEQ ID NO: 81991 - protein, 35 aa, Artificial Sequence; identical to SEQ ID NO: 47915
  GFR-binding peptide
  MOD_RES (1), (3): Xaa is C or S
  MOD_RES (14), (15), (16), (17), (18): Xaa is A or G
  MOD_RES (19), (20), (21), (22): Xaa is A or G or is absent

SEQ ID NO: 81992 - protein, 35 aa, Artificial Sequence; identical to SEQ ID NO: 18081
  GFR-binding peptide
  MOD_RES (1), (35): Xaa is C or S

SEQ ID NO: 81993 - protein, 38 aa, Artificial Sequence; identical to SEQ ID NO: 18082
  GFR-binding peptide
  MOD_RES (2), (2): Xaa is C or S

SEQ ID NO: 81994 - protein, 34 aa, Artificial Sequence; identical to SEQ ID NO: 50466
  GFR-binding peptide
  MOD_RES (31), (32): Xaa is C or S

SEQ ID NO: 81995 - protein, 39 aa, Artificial Sequence; identical to SEQ ID NO: 46660
  GFR-binding peptide
  MOD_RES (2), (35), (36): Xaa is C or S
  MOD_RES (13), (14), (15), (16), (17): Xaa is A or G
  MOD_RES (18), (19), (20), (21): Xaa is A or G or is absent

SEQ ID NO: 81996 - protein, 34 aa, Artificial Sequence; identical to SEQ ID NO: 46661
  GFR-binding peptide
  MOD_RES (1), (32), (33): Xaa is C or S

SEQ ID NO: 81997 - protein, 36 aa, Artificial Sequence; identical to SEQ ID NO: 50468
  GFR-binding peptide
  MOD_RES (33), (34): Xaa is C or S
  MOD_RES (11), (12), (13), (14), (15): Xaa is A or G
  MOD_RES (16), (17), (18), (19): Xaa is A or G or is absent

SEQ ID NO: 81998 - protein, 32 aa, Artificial Sequence; identical to SEQ ID NO: 49211
  GFR-binding peptide
  MOD_RES (11), (12), (13), (14), (15): Xaa is A or G
  MOD_RES (16), (17), (18), (19): Xaa is A or G or is absent

SEQ ID NO: 81999 - protein, 34 aa, Artificial Sequence; identical to SEQ ID NO: 17267
  GFR-binding peptide
  MOD_RES (13), (14), (15), (16), (17): Xaa is A or G
  MOD_RES (18), (19), (20), (21): Xaa is A or G or is absent

SEQ ID NO: 82000 - protein, 35 aa, Artificial Sequence; identical to SEQ ID NO: 47924
  GFR-binding peptide
  MOD_RES (1), (3): Xaa is C or S
  MOD_RES (14), (15), (16), (17), (18): Xaa is A or G
  MOD_RES (19), (20), (21), (22): Xaa is A or G or is absent

SEQ ID NO: 82001 - protein, 39 aa, Artificial Sequence; identical to SEQ ID NO: 17268
  GFR-binding peptide
  MOD_RES (1), (3), (37): Xaa is C or S
  MOD_RES (15), (16), (17), (18), (19): Xaa is A or G
  MOD_RES (20), (21), (22), (23): Xaa is A or G or is absent

SEQ ID NO: 82002 - protein, 39 aa, Artificial Sequence; identical to SEQ ID NO: 18087
  GFR-binding peptide
  MOD_RES (34), (34): Xaa is C or S
  MOD_RES (12), (13), (14), (15), (16): Xaa is A or G
  MOD_RES (17), (18), (19), (20): Xaa is A or G or is absent

SEQ ID NO: 82003 - protein, 32 aa, Artificial Sequence; identical to SEQ ID NO: 47927
  GFR-binding peptide
  MOD_RES (31), (32): Xaa is C or S

SEQ ID NO: 82004 - protein, 34 aa, Artificial Sequence; identical to SEQ ID NO: 18089
  GFR-binding peptide
  MOD_RES (33), (33): Xaa is C or S

SEQ ID NO: 82005 - protein, 35 aa, Artificial Sequence; identical to SEQ ID NO: 17272
  GFR-binding peptide
  MOD_RES (35), (35): Xaa is C or S
  MOD_RES (11), (12), (13), (14), (15): Xaa is A or G
  MOD_RES (16), (17), (18), (19): Xaa is A or G or is absent

SEQ ID NO: 82006 - protein, 37 aa, Artificial Sequence; identical to SEQ ID NO: 17275
  GFR-binding peptide
  MOD_RES (1), (3), (37): Xaa is C or S
  MOD_RES (15), (16), (17), (18), (19): Xaa is A or G
  MOD_RES (20), (21), (22), (23): Xaa is A or G or is absent

SEQ ID NO: 82007 - protein, 42 aa, Artificial Sequence; identical to SEQ ID NO: 17276
  GFR-binding peptide
  MOD_RES (2), (4), (38): Xaa is C or S

SEQ ID NO: 82008 - protein, 35 aa, Artificial Sequence; identical to SEQ ID NO: 18091
  GFR-binding peptide
  MOD_RES (2), (2): Xaa is C or S
  MOD_RES (14), (15), (16), (17), (18): Xaa is A or G
  MOD_RES (19), (20), (21), (22): Xaa is A or G or is absent

SEQ ID NO: 82009 - protein, 36 aa, Artificial Sequence; identical to SEQ ID NO: 18092
  GFR-binding peptide

SEQ ID NO: 82010 - protein, 36 aa, Artificial Sequence; identical to SEQ ID NO: 18093
  GFR-binding peptide
  MOD_RES (1), (1): Xaa is C or S

SEQ ID NO: 82011 - protein, 33 aa, Artificial Sequence; identical to SEQ ID NO: 50477
  GFR-binding peptide
  MOD_RES (1), (1): Xaa is C or S
  MOD_RES (12), (13), (14), (15), (16): Xaa is A or G
  MOD_RES (17), (18), (19), (20): Xaa is A or G or is absent

SEQ ID NO: 82012 - protein, 38 aa, Artificial Sequence; identical to SEQ ID NO: 18094
  GFR-binding peptide
  MOD_RES (1), (35): Xaa is C or S
  MOD_RES (13), (14), (15), (16), (17): Xaa is A or G
  MOD_RES (18), (19), (20), (21): Xaa is A or G or is absent

SEQ ID NO: 82013 - protein, 41 aa, Artificial Sequence; identical to SEQ ID NO: 17277
  GFR-binding peptide
  MOD_RES (1), (3), (40): Xaa is C or S
  MOD_RES (16), (17), (18), (19), (20): Xaa is A or G
  MOD_RES (21), (22), (23), (24): Xaa is A or G or is absent

SEQ ID NO: 82014 - protein, 33 aa, Artificial Sequence; identical to SEQ ID NO: 18095
  GFR-binding peptide

SEQ ID NO: 82015 - protein, 33 aa, Artificial Sequence; identical to SEQ ID NO: 46677
  GFR-binding peptide
  MOD_RES (33), (33): Xaa is C or S
  MOD_RES (11), (12), (13), (14), (15): Xaa is A or G
  MOD_RES (16), (17), (18), (19): Xaa is A or G or is absent

SEQ ID NO: 82016 - protein, 35 aa, Artificial Sequence; identical to SEQ ID NO: 18097
  GFR-binding peptide
  MOD_RES (33), (33): Xaa is C or S

SEQ ID NO: 82017 - protein, 41 aa, Artificial Sequence; identical to SEQ ID NO: 17284
  GFR-binding peptide
  MOD_RES (2), (4), (38): Xaa is C or S

SEQ ID NO: 82018 - protein, 33 aa, Artificial Sequence; identical to SEQ ID NO: 17285
  GFR-binding peptide
  MOD_RES (12), (13), (14), (15), (16): Xaa is A or G
  MOD_RES (17), (18), (19), (20): Xaa is A or G or is absent

SEQ ID NO: 82019 - protein, 36 aa, Artificial Sequence; identical to SEQ ID NO: 18099
  GFR-binding peptide
  MOD_RES (35), (35): Xaa is C or S

SEQ ID NO: 82020 - protein, 33 aa, Artificial Sequence; identical to SEQ ID NO: 46680
  GFR-binding peptide
  MOD_RES (33), (33): Xaa is C or S
  MOD_RES (11), (12), (13), (14), (15): Xaa is A or G
  MOD_RES (16), (17), (18), (19): Xaa is A or G or is absent

SEQ ID NO: 82021 - protein, 38 aa, Artificial Sequence; identical to SEQ ID NO: 50486
  GFR-binding peptide
  MOD_RES (1), (3), (34), (35): Xaa is C or S

SEQ ID NO: 82022 - protein, 38 aa, Artificial Sequence; identical to SEQ ID NO: 17286
  GFR-binding peptide
  MOD_RES (33), (33): Xaa is C or S

SEQ ID NO: 82023 - protein, 39 aa, Artificial Sequence; identical to SEQ ID NO: 50488
  GFR-binding peptide
  MOD_RES (2), (35), (36): Xaa is C or S
  MOD_RES (13), (14), (15), (16), (17): Xaa is A or G
  MOD_RES (18), (19), (20), (21): Xaa is A or G or is absent

SEQ ID NO: 82024 - protein, 34 aa, Artificial Sequence; identical to SEQ ID NO: 50493
  GFR-binding peptide
  MOD_RES (2), (33), (34): Xaa is C or S

SEQ ID NO: 82025 - protein, 34 aa, Artificial Sequence; identical to SEQ ID NO: 18100
  GFR-binding peptide
  MOD_RES (34), (34): Xaa is C or S

SEQ ID NO: 82026 - protein, 41 aa, Artificial Sequence; identical to SEQ ID NO: 17288
  GFR-binding peptide
  MOD_RES (1), (3), (40): Xaa is C or S
  MOD_RES (16), (17), (18), (19), (20): Xaa is A or G
  MOD_RES (21), (22), (23), (24): Xaa is A or G or is absent

SEQ ID NO: 82027 - protein, 39 aa, Artificial Sequence; identical to SEQ ID NO: 17290
  GFR-binding peptide
  MOD_RES (2), (39): Xaa is C or S

SEQ ID NO: 82028 - protein, 35 aa, Artificial Sequence; identical to SEQ ID NO: 18101
  GFR-binding peptide
  MOD_RES (1), (1): Xaa is C or S
  MOD_RES (14), (15), (16), (17), (18): Xaa is A or G
  MOD_RES (19), (20), (21), (22): Xaa is A or G or is absent

SEQ ID NO: 82029 - protein, 44 aa, Artificial Sequence; identical to SEQ ID NO: 18103
  GFR-binding peptide
  MOD_RES (2), (4), (41): Xaa is C or S

SEQ ID NO: 82030 - protein, 39 aa, Artificial Sequence; identical to SEQ ID NO: 17291
  GFR-binding peptide
  MOD_RES (34), (34): Xaa is C or S
  MOD_RES (12), (13), (14), (15), (16): Xaa is A or G
  MOD_RES (17), (18), (19), (20): Xaa is A or G or is absent

SEQ ID NO: 82031 - protein, 39 aa, Artificial Sequence; identical to SEQ ID NO: 50495
  GFR-binding peptide
  MOD_RES (1), (34), (35): Xaa is C or S
  MOD_RES (12), (13), (14), (15), (16): Xaa is A or G
  MOD_RES (17), (18), (19), (20): Xaa is A or G or is absent

SEQ ID NO: 82032 - protein, 37 aa, Artificial Sequence; identical to SEQ ID NO: 18104
  GFR-binding peptide
  MOD_RES (33), (33): Xaa is C or S
  MOD_RES (11), (12), (13), (14), (15): Xaa is A or G
  MOD_RES (16), (17), (18), (19): Xaa is A or G or is absent

SEQ ID NO: 82033 - protein, 39 aa, Artificial Sequence; identical to SEQ ID NO: 50498
  GFR-binding peptide
  MOD_RES (1), (34), (35): Xaa is C or S
  MOD_RES (12), (13), (14), (15), (16): Xaa is A or G
  MOD_RES (17), (18), (19), (20): Xaa is A or G or is absent

SEQ ID NO: 82034 - protein, 39 aa, Artificial Sequence; identical to SEQ ID NO: 17292
  GFR-binding peptide
  MOD_RES (36), (36): Xaa is C or S

SEQ ID NO: 82035 - protein, 38 aa, Artificial Sequence; identical to SEQ ID NO: 17293
  GFR-binding peptide
  MOD_RES (1), (3): Xaa is C or S
  MOD_RES (16), (17), (18), (19), (20): Xaa is A or G
  MOD_RES (21), (22), (23), (24): Xaa is A or G or is absent

SEQ ID NO: 82036 - protein, 32 aa, Artificial Sequence; identical to SEQ ID NO: 50499
  GFR-binding peptide
  MOD_RES (2), (2): Xaa is C or S

SEQ ID NO: 82037 - protein, 41 aa, Artificial Sequence; identical to SEQ ID NO: 49243
  GFR-binding peptide
  MOD_RES (2), (4), (35), (36): Xaa is C or S

SEQ ID NO: 82038 - protein, 40 aa, Artificial Sequence; identical to SEQ ID NO: 17295
  GFR-binding peptide
  MOD_RES (2), (36): Xaa is C or S
  MOD_RES (14), (15), (16), (17), (18): Xaa is A or G
  MOD_RES (19), (20), (21), (22): Xaa is A or G or is absent

SEQ ID NO: 82039 - protein, 31 aa, Artificial Sequence; identical to SEQ ID NO: 47956
  GFR-binding peptide
  MOD_RES (1), (1): Xaa is C or S

SEQ ID NO: 82040 - protein, 36 aa, Artificial Sequence; identical to SEQ ID NO: 18106
  GFR-binding peptide
  MOD_RES (1), (35): Xaa is C or S
  MOD_RES (13), (14), (15), (16), (17): Xaa is A or G
  MOD_RES (18), (19), (20), (21): Xaa is A or G or is absent

SEQ ID NO: 82041 - protein, 42 aa, Artificial Sequence; identical to SEQ ID NO: 17296
  GFR-binding peptide
  MOD_RES (2), (4), (38): Xaa is C or S

SEQ ID NO: 82042 - protein, 41 aa, Artificial Sequence; identical to SEQ ID NO: 17297
  GFR-binding peptide
  MOD_RES (1), (3), (37): Xaa is C or S
  MOD_RES (15), (16), (17), (18), (19): Xaa is A or G
  MOD_RES (20), (21), (22), (23): Xaa is A or G or is absent

SEQ ID NO: 82043 - protein, 40 aa, Artificial Sequence; identical to SEQ ID NO: 18108
  GFR-binding peptide
  MOD_RES (37), (37): Xaa is C or S

SEQ ID NO: 82044 - protein, 38 aa, Artificial Sequence; identical to SEQ ID NO: 18110
  GFR-binding peptide
  MOD_RES (36), (36): Xaa is C or S
  MOD_RES (12), (13), (14), (15), (16): Xaa is A or G
  MOD_RES (17), (18), (19), (20): Xaa is A or G or is absent

SEQ ID NO: 82045 - protein, 40 aa, Artificial Sequence; identical to SEQ ID NO: 46697
  GFR-binding peptide
  MOD_RES (2), (4), (37), (38): Xaa is C or S
  MOD_RES (15), (16), (17), (18), (19): Xaa is A or G
  MOD_RES (20), (21), (22), (23): Xaa is A or G or is absent

SEQ ID NO: 82046 - protein, 43 aa, Artificial Sequence; identical to SEQ ID NO: 17299
  GFR-binding peptide
  MOD_RES (1), (3), (37): Xaa is C or S

SEQ ID NO: 82047 - protein, 32 aa, Artificial Sequence; identical to SEQ ID NO: 47963
  GFR-binding peptide
  MOD_RES (1), (32): Xaa is C or S

SEQ ID NO: 82048 - protein, 40 aa, Artificial Sequence; identical to SEQ ID NO: 17301
  GFR-binding peptide
  MOD_RES (36), (36): Xaa is C or S

SEQ ID NO: 82049 - protein, 36 aa, Artificial Sequence; identical to SEQ ID NO: 18112
  GFR-binding peptide
  MOD_RES (1), (3): Xaa is C or S
  MOD_RES (15), (16), (17), (18), (19): Xaa is A or G
  MOD_RES (20), (21), (22), (23): Xaa is A or G or is absent

SEQ ID NO: 82050 - protein, 34 aa, Artificial Sequence; identical to SEQ ID NO: 17302
  GFR-binding peptide

SEQ ID NO: 82051 - protein, 41 aa, Artificial Sequence; identical to SEQ ID NO: 18113
  GFR-binding peptide
  MOD_RES (2), (39): Xaa is C or S

SEQ ID NO: 82052 - protein, 33 aa, Artificial Sequence; identical to SEQ ID NO: 46704
  GFR-binding peptide
  MOD_RES (1), (32), (33): Xaa is C or S

SEQ ID NO: 82053 - protein, 39 aa, Artificial Sequence; identical to SEQ ID NO: 18114
  GFR-binding peptide
  MOD_RES (1), (38): Xaa is C or S

SEQ ID NO: 82054 - protein, 44 aa, Artificial Sequence; identical to SEQ ID NO: 18117
  GFR-binding peptide
  MOD_RES (1), (3), (40): Xaa is C or S
  MOD_RES (16), (17), (18), (19), (20): Xaa is A or G
  MOD_RES (21), (22), (23), (24): Xaa is A or G or is absent

SEQ ID NO: 82055 - protein, 39 aa, Artificial Sequence; identical to SEQ ID NO: 18118
  GFR-binding peptide
  MOD_RES (2), (36): Xaa is C or S
  MOD_RES (14), (15), (16), (17), (18): Xaa is A or G
  MOD_RES (19), (20), (21), (22): Xaa is A or G or is absent

SEQ ID NO: 82056 - protein, 38 aa, Artificial Sequence; identical to SEQ ID NO: 18119
  GFR-binding peptide
  MOD_RES (33), (33): Xaa is C or S

SEQ ID NO: 82057 - protein, 33 aa, Artificial Sequence; identical to SEQ ID NO: 17308
  GFR-binding peptide
  MOD_RES (12), (13), (14), (15), (16): Xaa is A or G
  MOD_RES (17), (18), (19), (20): Xaa is A or G or is absent

SEQ ID NO: 82058 - protein, 39 aa, Artificial Sequence; identical to SEQ ID NO: 18120
  GFR-binding peptide
  MOD_RES (33), (33): Xaa is C or S

SEQ ID NO: 82059 - protein, 33 aa, Artificial Sequence; identical to SEQ ID NO: 17310
  GFR-binding peptide
  MOD_RES (12), (13), (14), (15), (16): Xaa is A or G
  MOD_RES (17), (18), (19), (20): Xaa is A or G or is absent

SEQ ID NO: 82060 - protein, 43 aa, Artificial Sequence; identical to SEQ ID NO: 18121
  GFR-binding peptide
  MOD_RES (2), (4), (41): Xaa is C or S

SEQ ID NO: 82061 - protein, 34 aa, Artificial Sequence; identical to SEQ ID NO: 18123
  GFR-binding peptide
  MOD_RES (33), (33): Xaa is C or S

SEQ ID NO: 82062 - protein, 39 aa, Artificial Sequence; identical to SEQ ID NO: 47985
  GFR-binding peptide
  MOD_RES (1), (34), (35): Xaa is C or S
  MOD_RES (12), (13), (14), (15), (16): Xaa is A or G
  MOD_RES (17), (18), (19), (20): Xaa is A or G or is absent

SEQ ID NO: 82063 - protein, 45 aa, Artificial Sequence; identical to SEQ ID NO: 18125
  GFR-binding peptide
  MOD_RES (2), (4), (41): Xaa is C or S

SEQ ID NO: 82064 - protein, 38 aa, Artificial Sequence; identical to SEQ ID NO: 50532
  GFR-binding peptide
  MOD_RES (1), (3), (34), (35): Xaa is C or S

SEQ ID NO: 82065 - protein, 35 aa, Artificial Sequence; identical to SEQ ID NO: 17317
  GFR-binding peptide
  MOD_RES (34), (34): Xaa is C or S

SEQ ID NO: 82066 - protein, 35 aa, Artificial Sequence; identical to SEQ ID NO: 18126
  GFR-binding peptide
  MOD_RES (33), (33): Xaa is C or S
  MOD_RES (11), (12), (13), (14), (15): Xaa is A or G
  MOD_RES (16), (17), (18), (19): Xaa is A or G or is absent

SEQ ID NO: 82067 - protein, 38 aa, Artificial Sequence; identical to SEQ ID NO: 49271
  GFR-binding peptide
  MOD_RES (1), (34), (35): Xaa is C or S
  MOD_RES (12), (13), (14), (15), (16): Xaa is A or G
  MOD_RES (17), (18), (19), (20): Xaa is A or G or is absent

SEQ ID NO: 82068 - protein, 37 aa, Artificial Sequence; identical to SEQ ID NO: 49276
  GFR-binding peptide
  MOD_RES (31), (32): Xaa is C or S

SEQ ID NO: 82069 - protein, 36 aa, Artificial Sequence; identical to SEQ ID NO: 18129
  GFR-binding peptide
  MOD_RES (1), (1): Xaa is C or S
  MOD_RES (14), (15), (16), (17), (18): Xaa is A or G
  MOD_RES (19), (20), (21), (22): Xaa is A or G or is absent

SEQ ID NO: 82070 - protein, 36 aa, Artificial Sequence; identical to SEQ ID NO: 50540
  GFR-binding peptide
  MOD_RES (1), (3), (36): Xaa is C or S
  MOD_RES (14), (15), (16), (17), (18): Xaa is A or G
  MOD_RES (19), (20), (21), (22): Xaa is A or G or is absent

SEQ ID NO: 82071 - protein, 36 aa, Artificial Sequence; identical to SEQ ID NO: 17321
  GFR-binding peptide
  MOD_RES (1), (35): Xaa is C or S

SEQ ID NO: 82072 - protein, 42 aa, Artificial Sequence; identical to SEQ ID NO: 17323
  GFR-binding peptide
  MOD_RES (1), (3), (37): Xaa is C or S

SEQ ID NO: 82073 - protein, 37 aa, Artificial Sequence; identical to SEQ ID NO: 50542
  GFR-binding peptide
  MOD_RES (2), (33), (34): Xaa is C or S

SEQ ID NO: 82074 - protein, 38 aa, Artificial Sequence; identical to SEQ ID NO: 17324
  GFR-binding peptide
  MOD_RES (2), (36): Xaa is C or S

SEQ ID NO: 82075 - protein, 37 aa, Artificial Sequence; identical to SEQ ID NO: 17326
  GFR-binding peptide
  MOD_RES (33), (33): Xaa is C or S

SEQ ID NO: 82076 - protein, 37 aa, Artificial Sequence; identical to SEQ ID NO: 49280
  GFR-binding peptide
  MOD_RES (2), (4), (37): Xaa is C or S
  MOD_RES (15), (16), (17), (18), (19): Xaa is A or G
  MOD_RES (20), (21), (22), (23): Xaa is A or G or is absent

SEQ ID NO: 82077 - protein, 40 aa, Artificial Sequence; identical to SEQ ID NO: 18131
  GFR-binding peptide
  MOD_RES (2), (39): Xaa is C or S

SEQ ID NO: 82078 - protein, 36 aa, Artificial Sequence; identical to SEQ ID NO: 18132
  GFR-binding peptide
  MOD_RES (2), (36): Xaa is C or S
  MOD_RES (14), (15), (16), (17), (18): Xaa is A or G
  MOD_RES (19), (20), (21), (22): Xaa is A or G or is absent

SEQ ID NO: 82079 - protein, 35 aa, Artificial Sequence; identical to SEQ ID NO: 17327
  GFR-binding peptide
  MOD_RES (1), (35): Xaa is C or S
  MOD_RES (13), (14), (15), (16), (17): Xaa is A or G
  MOD_RES (18), (19), (20), (21): Xaa is A or G or is absent

SEQ ID NO: 82080 - protein, 38 aa, Artificial Sequence; identical to SEQ ID NO: 49281
  GFR-binding peptide
  MOD_RES (2), (4), (35), (36): Xaa is C or S

SEQ ID NO: 82081 - protein, 37 aa, Artificial Sequence; identical to SEQ ID NO: 49282
  GFR-binding peptide
  MOD_RES (31), (32): Xaa is C or S

SEQ ID NO: 82082 - protein, 37 aa, Artificial Sequence; identical to SEQ ID NO: 18134
  GFR-binding peptide
  MOD_RES (33), (33): Xaa is C or S

SEQ ID NO: 82083 - protein, 35 aa, Artificial Sequence; identical to SEQ ID NO: 50548
  GFR-binding peptide
  MOD_RES (31), (32): Xaa is C or S

SEQ ID NO: 82084 - protein, 41 aa, Artificial Sequence; identical to SEQ ID NO: 18136
  GFR-binding peptide
  MOD_RES (2), (36): Xaa is C or S

SEQ ID NO: 82085 - protein, 35 aa, Artificial Sequence; identical to SEQ ID NO: 17330
  GFR-binding peptide
  MOD_RES (33), (33): Xaa is C or S

SEQ ID NO: 82086 - protein, 35 aa, Artificial Sequence; identical to SEQ ID NO: 17332
  GFR-binding peptide
  MOD_RES (1), (1): Xaa is C or S

SEQ ID NO: 82087 - protein, 40 aa, Artificial Sequence; identical to SEQ ID NO: 48002
  GFR-binding peptide
  MOD_RES (2), (4), (35), (36): Xaa is C or S

SEQ ID NO: 82088 - protein, 43 aa, Artificial Sequence; identical to SEQ ID NO: 18140
  GFR-binding peptide
  MOD_RES (2), (4), (38): Xaa is C or S
  MOD_RES (16), (17), (18), (19), (20): Xaa is A or G
  MOD_RES (21), (22), (23), (24): Xaa is A or G or is absent

SEQ ID NO: 82089 - protein, 36 aa, Artificial Sequence; identical to SEQ ID NO: 18142
  GFR-binding peptide
  MOD_RES (36), (36): Xaa is C or S
  MOD_RES (12), (13), (14), (15), (16): Xaa is A or G
  MOD_RES (17), (18), (19), (20): Xaa is A or G or is absent

SEQ ID NO: 82090 - protein, 42 aa, Artificial Sequence; identical to SEQ ID NO: 17334
  GFR-binding peptide
  MOD_RES (1), (3), (37): Xaa is C or S
  MOD_RES (15), (16), (17), (18), (19): Xaa is A or G
  MOD_RES (20), (21), (22), (23): Xaa is A or G or is absent

SEQ ID NO: 82091 - protein, 35 aa, Artificial Sequence; identical to SEQ ID NO: 48007
  GFR-binding peptide
  MOD_RES (2), (4), (35): Xaa is C or S

SEQ ID NO: 82092 - protein, 38 aa, Artificial Sequence; identical to SEQ ID NO: 46748
  GFR-binding peptide
  MOD_RES (1), (3), (36), (37): Xaa is C or S
  MOD_RES (14), (15), (16), (17), (18): Xaa is A or G
  MOD_RES (19), (20), (21), (22): Xaa is A or G or is absent

SEQ ID NO: 82093 - protein, 33 aa, Artificial Sequence; identical to SEQ ID NO: 17337
  GFR-binding peptide
  MOD_RES (11), (12), (13), (14), (15): Xaa is A or G
  MOD_RES (16), (17), (18), (19): Xaa is A or G or is absent

SEQ ID NO: 82094 - protein, 38 aa, Artificial Sequence; identical to SEQ ID NO: 18144
  GFR-binding peptide
  MOD_RES (34), (34): Xaa is C or S
  MOD_RES (12), (13), (14), (15), (16): Xaa is A or G
  MOD_RES (17), (18), (19), (20): Xaa is A or G or is absent

SEQ ID NO: 82095 - protein, 34 aa, Artificial Sequence; identical to SEQ ID NO: 48018
  GFR-binding peptide
  MOD_RES (2), (4): Xaa is C or S

SEQ ID NO: 82096 - protein, 40 aa, Artificial Sequence; identical to SEQ ID NO: 18149
  GFR-binding peptide
  MOD_RES (36), (36): Xaa is C or S
  MOD_RES (12), (13), (14), (15), (16): Xaa is A or G
  MOD_RES (17), (18), (19), (20): Xaa is A or G or is absent

SEQ ID NO: 82097 - protein, 39 aa, Artificial Sequence; identical to SEQ ID NO: 18152
  GFR-binding peptide
  MOD_RES (1), (3), (37): Xaa is C or S
  MOD_RES (15), (16), (17), (18), (19): Xaa is A or G
  MOD_RES (20), (21), (22), (23): Xaa is A or G or is absent

SEQ ID NO: 82098 - protein, 43 aa, Artificial Sequence; identical to SEQ ID NO: 18153
  GFR-binding peptide
  MOD_RES (2), (4), (38): Xaa is C or S
  MOD_RES (16), (17), (18), (19), (20): Xaa is A or G
  MOD_RES (21), (22), (23), (24): Xaa is A or G or is absent

SEQ ID NO: 82099 - protein, 40 aa, Artificial Sequence; identical to SEQ ID NO: 17340
  GFR-binding peptide
  MOD_RES (2), (4): Xaa is C or S

SEQ ID NO: 82100 - protein, 37 aa, Artificial Sequence; identical to SEQ ID NO: 50570
  GFR-binding peptide
  MOD_RES (1), (3), (34), (35): Xaa is C or S

SEQ ID NO: 82101 - protein, 44 aa, Artificial Sequence; identical to SEQ ID NO: 18155
  GFR-binding peptide
  MOD_RES (1), (3), (40): Xaa is C or S
  MOD_RES (16), (17), (18), (19), (20): Xaa is A or G
  MOD_RES (21), (22), (23), (24): Xaa is A or G or is absent

SEQ ID NO: 82102 - protein, 38 aa, Artificial Sequence; identical to SEQ ID NO: 17343
  GFR-binding peptide
  MOD_RES (34), (34): Xaa is C or S
  MOD_RES (12), (13), (14), (15), (16): Xaa is A or G
  MOD_RES (17), (18), (19), (20): Xaa is A or G or is absent

SEQ ID NO: 82103 - protein, 35 aa, Artificial Sequence; identical to SEQ ID NO: 17345
  GFR-binding peptide
  MOD_RES (2), (2): Xaa is C or S

SEQ ID NO: 82104 - protein, 34 aa, Artificial Sequence; identical to SEQ ID NO: 46763
  GFR-binding peptide
  MOD_RES (31), (32): Xaa is C or S

SEQ ID NO: 82105 - protein, 38 aa, Artificial Sequence; identical to SEQ ID NO: 18156
  GFR-binding peptide
  MOD_RES (33), (33): Xaa is C or S
  MOD_RES (11), (12), (13), (14), (15): Xaa is A or G
  MOD_RES (16), (17), (18), (19): Xaa is A or G or is absent

SEQ ID NO: 82106 - protein, 42 aa, Artificial Sequence; identical to SEQ ID NO: 17348
  GFR-binding peptide
  MOD_RES (2), (39): Xaa is C or S
  MOD_RES (15), (16), (17), (18), (19): Xaa is A or G
  MOD_RES (20), (21), (22), (23): Xaa is A or G or is absent

SEQ ID NO: 82107 - protein, 36 aa, Artificial Sequence; identical to SEQ ID NO: 18157
  GFR-binding peptide
  MOD_RES (1), (35): Xaa is C or S
  MOD_RES (13), (14), (15), (16), (17): Xaa is A or G
  MOD_RES (18), (19), (20), (21): Xaa is A or G or is absent

SEQ ID NO: 82108 - protein, 38 aa, Artificial Sequence; identical to SEQ ID NO: 49318
  GFR-binding peptide
  MOD_RES (33), (34): Xaa is C or S
  MOD_RES (11), (12), (13), (14), (15): Xaa is A or G
  MOD_RES (16), (17), (18), (19): Xaa is A or G or is absent

SEQ ID NO: 82109 - protein, 39 aa, Artificial Sequence; identical to SEQ ID NO: 46766
  GFR-binding peptide
  MOD_RES (33), (34): Xaa is C or S
  MOD_RES (11), (12), (13), (14), (15): Xaa is A or G
  MOD_RES (16), (17), (18), (19): Xaa is A or G or is absent

SEQ ID NO: 82110 - protein, 42 aa, Artificial Sequence; identical to SEQ ID NO: 17351
  GFR-binding peptide
  MOD_RES (2), (39): Xaa is C or S

SEQ ID NO: 82111 - protein, 37 aa, Artificial Sequence; identical to SEQ ID NO: 49324
  GFR-binding peptide
  MOD_RES (1), (34), (35): Xaa is C or S
  MOD_RES (12), (13), (14), (15), (16): Xaa is A or G
  MOD_RES (17), (18), (19), (20): Xaa is A or G or is absent

SEQ ID NO: 82112 - protein, 40 aa, Artificial Sequence; identical to SEQ ID NO: 18161
  GFR-binding peptide
  MOD_RES (34), (34): Xaa is C or S
  MOD_RES (12), (13), (14), (15), (16): Xaa is A or G
  MOD_RES (17), (18), (19), (20): Xaa is A or G or is absent

SEQ ID NO: 82113 - protein, 34 aa, Artificial Sequence; identical to SEQ ID NO: 50579
  GFR-binding peptide
  MOD_RES (2), (2): Xaa is C or S
  MOD_RES (13), (14), (15), (16), (17): Xaa is A or G
  MOD_RES (18), (19), (20), (21): Xaa is A or G or is absent

SEQ ID NO: 82114 - protein, 37 aa, Artificial Sequence; identical to SEQ ID NO: 18162
  GFR-binding peptide
  MOD_RES (36), (36): Xaa is C or S

SEQ ID NO: 82115 - protein, 39 aa, Artificial Sequence; identical to SEQ ID NO: 48041
  GFR-binding peptide
  MOD_RES (2), (33), (34): Xaa is C or S

SEQ ID NO: 82116 - protein, 38 aa, Artificial Sequence; identical to SEQ ID NO: 50584
  GFR-binding peptide
  MOD_RES (1), (3), (34), (35): Xaa is C or S

SEQ ID NO: 82117 - protein, 36 aa, Artificial Sequence; identical to SEQ ID NO: 49331
  GFR-binding peptide
  MOD_RES (31), (32): Xaa is C or S

SEQ ID NO: 82118 - protein, 37 aa, Artificial Sequence; identical to SEQ ID NO: 48046
  GFR-binding peptide
  MOD_RES (31), (32): Xaa is C or S

SEQ ID NO: 82119 - protein, 36 aa, Artificial Sequence; identical to SEQ ID NO: 49335
  GFR-binding peptide
  MOD_RES (2), (4), (35), (36): Xaa is C or S

SEQ ID NO: 82120 - protein, 39 aa, Artificial Sequence; identical to SEQ ID NO: 17357
  GFR-binding peptide
  MOD_RES (1), (3): Xaa is C or S

SEQ ID NO: 82121 - protein, 36 aa, Artificial Sequence; identical to SEQ ID NO: 46779
  GFR-binding peptide
  MOD_RES (1), (32), (33): Xaa is C or S

SEQ ID NO: 82122 - protein, 38 aa, Artificial Sequence; identical to SEQ ID NO: 49338
  GFR-binding peptide
  MOD_RES (1), (3), (36), (37): Xaa is C or S
  MOD_RES (14), (15), (16), (17), (18): Xaa is A or G
  MOD_RES (19), (20), (21), (22): Xaa is A or G or is absent

SEQ ID NO: 82123 - protein, 39 aa, Artificial Sequence; identical to SEQ ID NO: 49339
  GFR-binding peptide
  MOD_RES (1), (3), (34), (35): Xaa is C or S

SEQ ID NO: 82124 - protein, 37 aa, Artificial Sequence; identical to SEQ ID NO: 50599
  GFR-binding peptide
  MOD_RES (2), (4), (35), (36): Xaa is C or S

SEQ ID NO: 82125 - protein, 33 aa, Artificial Sequence; identical to SEQ ID NO: 49341
  GFR-binding peptide
  MOD_RES (2), (33): Xaa is C or S

SEQ ID NO: 82126 - protein, 43 aa, Artificial Sequence; identical to SEQ ID NO: 18166
  GFR-binding peptide
  MOD_RES (1), (3), (40): Xaa is C or S

SEQ ID NO: 82127 - protein, 35 aa, Artificial Sequence; identical to SEQ ID NO: 50600
  GFR-binding peptide
  MOD_RES (2), (35): Xaa is C or S
  MOD_RES (13), (14), (15), (16), (17): Xaa is A or G
  MOD_RES (18), (19), (20), (21): Xaa is A or G or is absent

SEQ ID NO: 82128 - protein, 34 aa, Artificial Sequence; identical to SEQ ID NO: 49349
  GFR-binding peptide
  MOD_RES (1), (32), (33): Xaa is C or S

SEQ ID NO: 82129 - protein, 37 aa, Artificial Sequence; identical to SEQ ID NO: 18168
  GFR-binding peptide
  MOD_RES (1), (1): Xaa is C or S
  MOD_RES (14), (15), (16), (17), (18): Xaa is A or G
  MOD_RES (19), (20), (21), (22): Xaa is A or G or is absent

SEQ ID NO: 82130 - protein, 37 aa, Artificial Sequence; identical to SEQ ID NO: 48061
  GFR-binding peptide
  MOD_RES (1), (3), (36), (37): Xaa is C or S
  MOD_RES (14), (15), (16), (17), (18): Xaa is A or G
  MOD_RES (19), (20), (21), (22): Xaa is A or G or is absent

SEQ ID NO: 82131 - protein, 36 aa, Artificial Sequence; identical to SEQ ID NO: 18169
  GFR-binding peptide
  MOD_RES (1), (35): Xaa is C or S
  MOD_RES (13), (14), (15), (16), (17): Xaa is A or G
  MOD_RES (18), (19), (20), (21): Xaa is A or G or is absent

SEQ ID NO: 82132 - protein, 39 aa, Artificial Sequence; identical to SEQ ID NO: 17364
  GFR-binding peptide
  MOD_RES (1), (3), (37): Xaa is C or S

SEQ ID NO: 82133 - protein, 30 aa, Artificial Sequence; identical to SEQ ID NO: 48064
  GFR-binding peptide

SEQ ID NO: 82134 - protein, 41 aa, Artificial Sequence; identical to SEQ ID NO: 17365
  GFR-binding peptide
  MOD_RES (37), (37): Xaa is C or S
  MOD_RES (13), (14), (15), (16), (17): Xaa is A or G
  MOD_RES (18), (19), (20), (21): Xaa is A or G or is absent

SEQ ID NO: 82135 - protein, 39 aa, Artificial Sequence; identical to SEQ ID NO: 18179
  GFR-binding peptide
  MOD_RES (1), (38): Xaa is C or S
  MOD_RES (14), (15), (16), (17), (18): Xaa is A or G
  MOD_RES (19), (20), (21), (22): Xaa is A or G or is absent

SEQ ID NO: 82136 - protein, 40 aa, Artificial Sequence; identical to SEQ ID NO: 18182
  GFR-binding peptide
  MOD_RES (37), (37): Xaa is C or S

SEQ ID NO: 82137 - protein, 34 aa, Artificial Sequence; identical to SEQ ID NO: 17367
  GFR-binding peptide
  MOD_RES (34), (34): Xaa is C or S
  MOD_RES (12), (13), (14), (15), (16): Xaa is A or G
  MOD_RES (17), (18), (19), (20): Xaa is A or G or is absent

SEQ ID NO: 82138 - protein, 37 aa, Artificial Sequence; identical to SEQ ID NO: 17368
  GFR-binding peptide
  MOD_RES (37), (37): Xaa is C or S
  MOD_RES (13), (14), (15), (16), (17): Xaa is A or G
  MOD_RES (18), (19), (20), (21): Xaa is A or G or is absent

SEQ ID NO: 82139 - protein, 34 aa, Artificial Sequence; identical to SEQ ID NO: 50625
  GFR-binding peptide
  MOD_RES (2), (4): Xaa is C or S

SEQ ID NO: 82140 - protein, 39 aa, Artificial Sequence; identical to SEQ ID NO: 46804
  GFR-binding peptide
  MOD_RES (2), (4), (35), (36): Xaa is C or S

SEQ ID NO: 82141 - protein, 36 aa, Artificial Sequence; identical to SEQ ID NO: 46808
  GFR-binding peptide
  MOD_RES (2), (33), (34): Xaa is C or S

SEQ ID NO: 82142 - protein, 39 aa, Artificial Sequence; identical to SEQ ID NO: 18185
  GFR-binding peptide
  MOD_RES (35), (35): Xaa is C or S

SEQ ID NO: 82143 - protein, 35 aa, Artificial Sequence; identical to SEQ ID NO: 17371
  GFR-binding peptide
  MOD_RES (1), (1): Xaa is C or S

SEQ ID NO: 82144 - protein, 39 aa, Artificial Sequence; identical to SEQ ID NO: 48081
  GFR-binding peptide
  MOD_RES (2), (4), (35), (36): Xaa is C or S

SEQ ID NO: 82145 - protein, 44 aa, Artificial Sequence; identical to SEQ ID NO: 17374
  GFR-binding peptide
  MOD_RES (2), (4), (38): Xaa is C or S
  MOD_RES (16), (17), (18), (19), (20): Xaa is A or G
  MOD_RES (21), (22), (23), (24): Xaa is A or G or is absent

SEQ ID NO: 82146 - protein, 40 aa, Artificial Sequence; identical to SEQ ID NO: 17375
  GFR-binding peptide
  MOD_RES (2), (4), (38): Xaa is C or S
  MOD_RES (16), (17), (18), (19), (20): Xaa is A or G
  MOD_RES (21), (22), (23), (24): Xaa is A or G or is absent

SEQ ID NO: 82147 - protein, 37 aa, Artificial Sequence; identical to SEQ ID NO: 46815
  GFR-binding peptide
  MOD_RES (1), (34), (35): Xaa is C or S
  MOD_RES (12), (13), (14), (15), (16): Xaa is A or G
  MOD_RES (17), (18), (19), (20): Xaa is A or G or is absent

SEQ ID NO: 82148 - protein, 42 aa, Artificial Sequence; identical to SEQ ID NO: 18194
  GFR-binding peptide
  MOD_RES (2), (36): Xaa is C or S

SEQ ID NO: 82149 - protein, 42 aa, Artificial Sequence; identical to SEQ ID NO: 17376
  GFR-binding peptide
  MOD_RES (2), (36): Xaa is C or S

SEQ ID NO: 82150 - protein, 42 aa, Artificial Sequence; identical to SEQ ID NO: 18198
  GFR-binding peptide
  MOD_RES (2), (4), (41): Xaa is C or S

SEQ ID NO: 82151 - protein, 34 aa, Artificial Sequence; identical to SEQ ID NO: 17377
  GFR-binding peptide

SEQ ID NO: 82152 - protein, 35 aa, Artificial Sequence; identical to SEQ ID NO: 50639
  GFR-binding peptide
  MOD_RES (1), (34), (35): Xaa is C or S
  MOD_RES (12), (13), (14), (15), (16): Xaa is A or G
  MOD_RES (17), (18), (19), (20): Xaa is A or G or is absent

SEQ ID NO: 82153 - protein, 42 aa, Artificial Sequence; identical to SEQ ID NO: 18200
  GFR-binding peptide
  MOD_RES (2), (4), (41): Xaa is C or S

SEQ ID NO: 82154 - protein, 44 aa, Artificial Sequence; identical to SEQ ID NO: 18201
  GFR-binding peptide
  MOD_RES (2), (4), (41): Xaa is C or S
  MOD_RES (17), (18), (19), (20), (21): Xaa is A or G
  MOD_RES (22), (23), (24), (25): Xaa is A or G or is absent

SEQ ID NO: 82155 - protein, 41 aa, Artificial Sequence; identical to SEQ ID NO: 18203
  GFR-binding peptide
  MOD_RES (2), (4), (41): Xaa is C or S

SEQ ID NO: 82156 - protein, 39 aa, Artificial Sequence; identical to SEQ ID NO: 46832
  GFR-binding peptide
  MOD_RES (2), (35), (36): Xaa is C or S
  MOD_RES (13), (14), (15), (16), (17): Xaa is A or G
  MOD_RES (18), (19), (20), (21): Xaa is A or G or is absent

SEQ ID NO: 82157 - protein, 39 aa, Artificial Sequence; identical to SEQ ID NO: 18205
  GFR-binding peptide
  MOD_RES (1), (38): Xaa is C or S
  MOD_RES (14), (15), (16), (17), (18): Xaa is A or G
  MOD_RES (19), (20), (21), (22): Xaa is A or G or is absent

SEQ ID NO: 82158 - protein, 36 aa, Artificial Sequence; identical to SEQ ID NO: 17381
  GFR-binding peptide
  MOD_RES (1), (35): Xaa is C or S

SEQ ID NO: 82159 - protein, 39 aa, Artificial Sequence; identical to SEQ ID NO: 18207
  GFR-binding peptide
  MOD_RES (35), (35): Xaa is C or S

SEQ ID NO: 82160 - protein, 40 aa, Artificial Sequence; identical to SEQ ID NO: 48108
  GFR-binding peptide
  MOD_RES (1), (3), (36), (37): Xaa is C or S
  MOD_RES (14), (15), (16), (17), (18): Xaa is A or G
  MOD_RES (19), (20), (21), (22): Xaa is A or G or is absent

SEQ ID NO: 82161 - protein, 34 aa, Artificial Sequence; identical to SEQ ID NO: 17383
  GFR-binding peptide

SEQ ID NO: 82162 - protein, 37 aa, Artificial Sequence; identical to SEQ ID NO: 50653
  GFR-binding peptide
  MOD_RES (2), (35), (36): Xaa is C or S
  MOD_RES (13), (14), (15), (16), (17): Xaa is A or G
  MOD_RES (18), (19), (20), (21): Xaa is A or G or is absent

SEQ ID NO: 82163 - protein, 34 aa, Artificial Sequence; identical to SEQ ID NO: 18211
  GFR-binding peptide

SEQ ID NO: 82164 - protein, 42 aa, Artificial Sequence; identical to SEQ ID NO: 18213
  GFR-binding peptide
  MOD_RES (2), (4), (41): Xaa is C or S
  MOD_RES (17), (18), (19), (20), (21): Xaa is A or G
  MOD_RES (22), (23), (24), (25): Xaa is A or G or is absent

SEQ ID NO: 82165 - protein, 39 aa, Artificial Sequence; identical to SEQ ID NO: 17384
  GFR-binding peptide
  MOD_RES (2), (36): Xaa is C or S

SEQ ID NO: 82166 - protein, 36 aa, Artificial Sequence; identical to SEQ ID NO: 17385
  GFR-binding peptide
  MOD_RES (35), (35): Xaa is C or S
  MOD_RES (11), (12), (13), (14), (15): Xaa is A or G
  MOD_RES (16), (17), (18), (19): Xaa is A or G or is absent

SEQ ID NO: 82167 - protein, 41 aa, Artificial Sequence; identical to SEQ ID NO: 17388
  GFR-binding peptide
  MOD_RES (1), (38): Xaa is C or S
  MOD_RES (14), (15), (16), (17), (18): Xaa is A or G
  MOD_RES (19), (20), (21), (22): Xaa is A or G or is absent

SEQ ID NO: 82168 - protein, 33 aa, Artificial Sequence; identical to SEQ ID NO: 50659
  GFR-binding peptide
  MOD_RES (1), (1): Xaa is C or S
  MOD_RES (12), (13), (14), (15), (16): Xaa is A or G
  MOD_RES (17), (18), (19), (20): Xaa is A or G or is absent

SEQ ID NO: 82169 - protein, 44 aa, Artificial Sequence; identical to SEQ ID NO: 18214
  GFR-binding peptide
  MOD_RES (1), (3), (40): Xaa is C or S

SEQ ID NO: 82170 - protein, 40 aa, Artificial Sequence; identical to SEQ ID NO: 18215
  GFR-binding peptide
  MOD_RES (1), (3), (40): Xaa is C or S

SEQ ID NO: 82171 - protein, 34 aa, Artificial Sequence; identical to SEQ ID NO: 49398
  GFR-binding peptide
  MOD_RES (2), (33), (34): Xaa is C or S

SEQ ID NO: 82172 - protein, 36 aa, Artificial Sequence; identical to SEQ ID NO: 49402
  GFR-binding peptide
  MOD_RES (31), (32): Xaa is C or S

SEQ ID NO: 82173 - protein, 43 aa, Artificial Sequence; identical to SEQ ID NO: 17390
  GFR-binding peptide
  MOD_RES (2), (4), (38): Xaa is C or S

SEQ ID NO: 82174 - protein, 40 aa, Artificial Sequence; identical to SEQ ID NO: 17391
  GFR-binding peptide
  MOD_RES (1), (3), (40): Xaa is C or S

SEQ ID NO: 82175 - protein, 38 aa, Artificial Sequence; identical to SEQ ID NO: 18220
  GFR-binding peptide
  MOD_RES (37), (37): Xaa is C or S

SEQ ID NO: 82176 - protein, 39 aa, Artificial Sequence; identical to SEQ ID NO: 18222
  GFR-binding peptide
  MOD_RES (2), (39): Xaa is C or S

SEQ ID NO: 82177 - protein, 37 aa, Artificial Sequence; identical to SEQ ID NO: 18223
  GFR-binding peptide
  MOD_RES (34), (34): Xaa is C or S

SEQ ID NO: 82178 - protein, 37 aa, Artificial Sequence; identical to SEQ ID NO: 49406
  GFR-binding peptide
  MOD_RES (31), (32): Xaa is C or S

SEQ ID NO: 82179 - protein, 33 aa, Artificial Sequence; identical to SEQ ID NO: 17393
  GFR-binding peptide

SEQ ID NO: 82180 - protein, 39 aa, Artificial Sequence; identical to SEQ ID NO: 17394
  GFR-binding peptide
  MOD_RES (36), (36): Xaa is C or S
  MOD_RES (12), (13), (14), (15), (16): Xaa is A or G
  MOD_RES (17), (18), (19), (20): Xaa is A or G or is absent

SEQ ID NO: 82181 - protein, 42 aa, Artificial Sequence; identical to SEQ ID NO: 18225
  GFR-binding peptide
  MOD_RES (2), (4), (38): Xaa is C or S

SEQ ID NO: 82182 - protein, 35 aa, Artificial Sequence; identical to SEQ ID NO: 49408
  GFR-binding peptide
  MOD_RES (2), (33), (34): Xaa is C or S

SEQ ID NO: 82183 - protein, 39 aa, Artificial Sequence; identical to SEQ ID NO: 18226
  GFR-binding peptide
  MOD_RES (2), (4): Xaa is C or S

SEQ ID NO: 82184 - protein, 36 aa, Artificial Sequence; identical to SEQ ID NO: 18227
  GFR-binding peptide
  MOD_RES (35), (35): Xaa is C or S
  MOD_RES (11), (12), (13), (14), (15): Xaa is A or G
  MOD_RES (16), (17), (18), (19): Xaa is A or G or is absent

SEQ ID NO: 82185 - protein, 36 aa, Artificial Sequence; identical to SEQ ID NO: 17395
  GFR-binding peptide
  MOD_RES (2), (2): Xaa is C or S

SEQ ID NO: 82186 - protein, 38 aa, Artificial Sequence; identical to SEQ ID NO: 48128
  GFR-binding peptide
  MOD_RES (1), (34), (35): Xaa is C or S
  MOD_RES (12), (13), (14), (15), (16): Xaa is A or G
  MOD_RES (17), (18), (19), (20): Xaa is A or G or is absent

SEQ ID NO: 82187 - protein, 40 aa, Artificial Sequence; identical to SEQ ID NO: 17397
  GFR-binding peptide
  MOD_RES (1), (3), (37): Xaa is C or S

SEQ ID NO: 82188 - protein, 40 aa, Artificial Sequence; identical to SEQ ID NO: 17398
  GFR-binding peptide
  MOD_RES (2), (36): Xaa is C or S

SEQ ID NO: 82189 - protein, 34 aa, Artificial Sequence; identical to SEQ ID NO: 49420
  GFR-binding peptide
  MOD_RES (33), (34): Xaa is C or S
  MOD_RES (11), (12), (13), (14), (15): Xaa is A or G
  MOD_RES (16), (17), (18), (19): Xaa is A or G or is absent

SEQ ID NO: 82190 - protein, 35 aa, Artificial Sequence; identical to SEQ ID NO: 48135
  GFR-binding peptide
  MOD_RES (2), (35): Xaa is C or S
  MOD_RES (13), (14), (15), (16), (17): Xaa is A or G
  MOD_RES (18), (19), (20), (21): Xaa is A or G or is absent

SEQ ID NO: 82191 - protein, 39 aa, Artificial Sequence; identical to SEQ ID NO: 46862
  GFR-binding peptide
  MOD_RES (2), (35), (36): Xaa is C or S
  MOD_RES (13), (14), (15), (16), (17): Xaa is A or G
  MOD_RES (18), (19), (20), (21): Xaa is A or G or is absent

SEQ ID NO: 82192 - protein, 38 aa, Artificial Sequence; identical to SEQ ID NO: 50686
  GFR-binding peptide
  MOD_RES (2), (35), (36): Xaa is C or S
  MOD_RES (13), (14), (15), (16), (17): Xaa is A or G
  MOD_RES (18), (19), (20), (21): Xaa is A or G or is absent

SEQ ID NO: 82193 - protein, 38 aa, Artificial Sequence; identical to SEQ ID NO: 18240
  GFR-binding peptide
  MOD_RES (1), (3), (37): Xaa is C or S

SEQ ID NO: 82194 - protein, 38 aa, Artificial Sequence; identical to SEQ ID NO: 46868
  GFR-binding peptide
  MOD_RES (2), (33), (34): Xaa is C or S

SEQ ID NO: 82195 - protein, 39 aa, Artificial Sequence; identical to SEQ ID NO: 17401
  GFR-binding peptide
  MOD_RES (33), (33): Xaa is C or S

SEQ ID NO: 82196 - protein, 41 aa, Artificial Sequence; identical to SEQ ID NO: 46869
  GFR-binding peptide
  MOD_RES (2), (4), (37), (38): Xaa is C or S
  MOD_RES (15), (16), (17), (18), (19): Xaa is A or G
  MOD_RES (20), (21), (22), (23): Xaa is A or G or is absent

SEQ ID NO: 82197 - protein, 42 aa, Artificial Sequence; identical to SEQ ID NO: 18243
  GFR-binding peptide
  MOD_RES (1), (3), (40): Xaa is C or S
  MOD_RES (16), (17), (18), (19), (20): Xaa is A or G
  MOD_RES (21), (22), (23), (24): Xaa is A or G or is absent

SEQ ID NO: 82198 - protein, 42 aa, Artificial Sequence; identical to SEQ ID NO: 18244
  GFR-binding peptide
  MOD_RES (1), (38): Xaa is C or S

SEQ ID NO: 82199 - protein, 33 aa, Artificial Sequence; identical to SEQ ID NO: 17402
  GFR-binding peptide
  MOD_RES (11), (12), (13), (14), (15): Xaa is A or G
  MOD_RES (16), (17), (18), (19): Xaa is A or G or is absent

SEQ ID NO: 82200 - protein, 38 aa, Artificial Sequence; identical to SEQ ID NO: 17403
  GFR-binding peptide
  MOD_RES (1), (38): Xaa is C or S

SEQ ID NO: 82201 - protein, 34 aa, Artificial Sequence; identical to SEQ ID NO: 46873
  GFR-binding peptide
  MOD_RES (33), (34): Xaa is C or S
  MOD_RES (11), (12), (13), (14), (15): Xaa is A or G
  MOD_RES (16), (17), (18), (19): Xaa is A or G or is absent

SEQ ID NO: 82202 - protein, 38 aa, Artificial Sequence; identical to SEQ ID NO: 17406
  GFR-binding peptide
  MOD_RES (36), (36): Xaa is C or S
  MOD_RES (12), (13), (14), (15), (16): Xaa is A or G
  MOD_RES (17), (18), (19), (20): Xaa is A or G or is absent

SEQ ID NO: 82203 - protein, 39 aa, Artificial Sequence; identical to SEQ ID NO: 17407
  GFR-binding peptide
  MOD_RES (33), (33): Xaa is C or S

SEQ ID NO: 82204 - protein, 37 aa, Artificial Sequence; identical to SEQ ID NO: 17410
  GFR-binding peptide
  MOD_RES (37), (37): Xaa is C or S
  MOD_RES (13), (14), (15), (16), (17): Xaa is A or G
  MOD_RES (18), (19), (20), (21): Xaa is A or G or is absent

SEQ ID NO: 82205 - protein, 38 aa, Artificial Sequence; identical to SEQ ID NO: 17411
  GFR-binding peptide
  MOD_RES (33), (33): Xaa is C or S

SEQ ID NO: 82206 - protein, 36 aa, Artificial Sequence; identical to SEQ ID NO: 49455
  GFR-binding peptide
  MOD_RES (1), (3), (34), (35): Xaa is C or S

SEQ ID NO: 82207 - protein, 33 aa, Artificial Sequence; identical to SEQ ID NO: 17413
  GFR-binding peptide
  MOD_RES (11), (12), (13), (14), (15): Xaa is A or G
  MOD_RES (16), (17), (18), (19): Xaa is A or G or is absent

SEQ ID NO: 82208 - protein, 37 aa, Artificial Sequence; identical to SEQ ID NO: 17415
  GFR-binding peptide
  MOD_RES (2), (2): Xaa is C or S

SEQ ID NO: 82209 - protein, 38 aa, Artificial Sequence; identical to SEQ ID NO: 17416
  GFR-binding peptide
  MOD_RES (2), (36): Xaa is C or S
  MOD_RES (14), (15), (16), (17), (18): Xaa is A or G
  MOD_RES (19), (20), (21), (22): Xaa is A or G or is absent

SEQ ID NO: 82210 - protein, 36 aa, Artificial Sequence; identical to SEQ ID NO: 17417
  GFR-binding peptide
  MOD_RES (13), (14), (15), (16), (17): Xaa is A or G
  MOD_RES (18), (19), (20), (21): Xaa is A or G or is absent

SEQ ID NO: 82211 - protein, 40 aa, Artificial Sequence; identical to SEQ ID NO: 48166
  GFR-binding peptide
  MOD_RES (1), (3), (36), (37): Xaa is C or S
  MOD_RES (14), (15), (16), (17), (18): Xaa is A or G
  MOD_RES (19), (20), (21), (22): Xaa is A or G or is absent

SEQ ID NO: 82212 - protein, 38 aa, Artificial Sequence; identical to SEQ ID NO: 17418
  GFR-binding peptide
  MOD_RES (1), (3), (37): Xaa is C or S
  MOD_RES (15), (16), (17), (18), (19): Xaa is A or G
  MOD_RES (20), (21), (22), (23): Xaa is A or G or is absent

SEQ ID NO: 82213 - protein, 38 aa, Artificial Sequence; identical to SEQ ID NO: 50710
  GFR-binding peptide
  MOD_RES (2), (4), (35), (36): Xaa is C or S

SEQ ID NO: 82214 - protein, 35 aa, Artificial Sequence; identical to SEQ ID NO: 46884
  GFR-binding peptide
  MOD_RES (31), (32): Xaa is C or S

SEQ ID NO: 82215 - protein, 36 aa, Artificial Sequence; identical to SEQ ID NO: 17419
  GFR-binding peptide
  MOD_RES (2), (2): Xaa is C or S
  MOD_RES (15), (16), (17), (18), (19): Xaa is A or G
  MOD_RES (20), (21), (22), (23): Xaa is A or G or is absent

SEQ ID NO: 82216 - protein, 36 aa, Artificial Sequence; identical to SEQ ID NO: 50713
  GFR-binding peptide
  MOD_RES (31), (32): Xaa is C or S

SEQ ID NO: 82217 - protein, 41 aa, Artificial Sequence; identical to SEQ ID NO: 18250
  GFR-binding peptide
  MOD_RES (2), (39): Xaa is C or S
  MOD_RES (15), (16), (17), (18), (19): Xaa is A or G
  MOD_RES (20), (21), (22), (23): Xaa is A or G or is absent

SEQ ID NO: 82218 - protein, 35 aa, Artificial Sequence; identical to SEQ ID NO: 49468
  GFR-binding peptide
  MOD_RES (1), (3): Xaa is C or S
  MOD_RES (14), (15), (16), (17), (18): Xaa is A or G
  MOD_RES (19), (20), (21), (22): Xaa is A or G or is absent

SEQ ID NO: 82219 - protein, 35 aa, Artificial Sequence; identical to SEQ ID NO: 18252
  GFR-binding peptide
  MOD_RES (13), (14), (15), (16), (17): Xaa is A or G
  MOD_RES (18), (19), (20), (21): Xaa is A or G or is absent

SEQ ID NO: 82220 - protein, 36 aa, Artificial Sequence; identical to SEQ ID NO: 48171
  GFR-binding peptide
  MOD_RES (2), (35), (36): Xaa is C or S
  MOD_RES (13), (14), (15), (16), (17): Xaa is A or G
  MOD_RES (18), (19), (20), (21): Xaa is A or G or is absent

SEQ ID NO: 82221 - protein, 40 aa, Artificial Sequence; identical to SEQ ID NO: 17422
  GFR-binding peptide
  MOD_RES (2), (4): Xaa is C or S

SEQ ID NO: 82222 - protein, 34 aa, Artificial Sequence; identical to SEQ ID NO: 46895
  GFR-binding peptide
  MOD_RES (33), (34): Xaa is C or S
  MOD_RES (11), (12), (13), (14), (15): Xaa is A or G
  MOD_RES (16), (17), (18), (19): Xaa is A or G or is absent

SEQ ID NO: 82223 - protein, 36 aa, Artificial Sequence; identical to SEQ ID NO: 49472
  GFR-binding peptide
  MOD_RES (1), (3), (34), (35): Xaa is C or S

SEQ ID NO: 82224 - protein, 34 aa, Artificial Sequence; identical to SEQ ID NO: 49473
  GFR-binding peptide
  MOD_RES (33), (34): Xaa is C or S
  MOD_RES (11), (12), (13), (14), (15): Xaa is A or G
  MOD_RES (16), (17), (18), (19): Xaa is A or G or is absent

SEQ ID NO: 82225 - protein, 39 aa, Artificial Sequence; identical to SEQ ID NO: 18254
  GFR-binding peptide
  MOD_RES (1), (35): Xaa is C or S
  MOD_RES (13), (14), (15), (16), (17): Xaa is A or G
  MOD_RES (18), (19), (20), (21): Xaa is A or G or is absent

SEQ ID NO: 82226 - protein, 38 aa, Artificial Sequence; identical to SEQ ID NO: 18255
  GFR-binding peptide
  MOD_RES (2), (4): Xaa is C or S

SEQ ID NO: 82227 - protein, 33 aa, Artificial Sequence; identical to SEQ ID NO: 48178
  GFR-binding peptide
  MOD_RES (2), (33): Xaa is C or S

SEQ ID NO: 82228 - protein, 40 aa, Artificial Sequence; identical to SEQ ID NO: 17426
  GFR-binding peptide
  MOD_RES (1), (3), (37): Xaa is C or S
  MOD_RES (15), (16), (17), (18), (19): Xaa is A or G
  MOD_RES (20), (21), (22), (23): Xaa is A or G or is absent

SEQ ID NO: 82229 - protein, 36 aa, Artificial Sequence; identical to SEQ ID NO: 18256
  GFR-binding peptide
  MOD_RES (34), (34): Xaa is C or S

SEQ ID NO: 82230 - protein, 43 aa, Artificial Sequence; identical to SEQ ID NO: 17427
  GFR-binding peptide
  MOD_RES (2), (4), (38): Xaa is C or S
  MOD_RES (16), (17), (18), (19), (20): Xaa is A or G
  MOD_RES (21), (22), (23), (24): Xaa is A or G or is absent

SEQ ID NO: 82231 - protein, 42 aa, Artificial Sequence; identical to SEQ ID NO: 18258
  GFR-binding peptide
  MOD_RES (2), (36): Xaa is C or S
  MOD_RES (14), (15), (16), (17), (18): Xaa is A or G
  MOD_RES (19), (20), (21), (22): Xaa is A or G or is absent

SEQ ID NO: 82232 - protein, 36 aa, Artificial Sequence; identical to SEQ ID NO: 18259
  GFR-binding peptide
  MOD_RES (2), (36): Xaa is C or S

SEQ ID NO: 82233 - protein, 38 aa, Artificial Sequence; identical to SEQ ID NO: 18263
  GFR-binding peptide
  MOD_RES (34), (34): Xaa is C or S

SEQ ID NO: 82234 - protein, 40 aa, Artificial Sequence; identical to SEQ ID NO: 48187
  GFR-binding peptide
  MOD_RES (1), (3), (34), (35): Xaa is C or S

SEQ ID NO: 82235 - protein, 33 aa, Artificial Sequence; identical to SEQ ID NO: 49484
  GFR-binding peptide
  MOD_RES (31), (32): Xaa is C or S

SEQ ID NO: 82236 - protein, 41 aa, Artificial Sequence; identical to SEQ ID NO: 18264
  GFR-binding peptide
  MOD_RES (2), (39): Xaa is C or S

SEQ ID NO: 82237 - protein, 35 aa, Artificial Sequence; identical to SEQ ID NO: 18265
  GFR-binding peptide
  MOD_RES (2), (2): Xaa is C or S

SEQ ID NO: 82238 - protein, 39 aa, Artificial Sequence; identical to SEQ ID NO: 18266
  GFR-binding peptide
  MOD_RES (2), (4): Xaa is C or S
  MOD_RES (17), (18), (19), (20), (21): Xaa is A or G
  MOD_RES (22), (23), (24), (25): Xaa is A or G or is absent

SEQ ID NO: 82239 - protein, 40 aa, Artificial Sequence; identical to SEQ ID NO: 17432
  GFR-binding peptide
  MOD_RES (36), (36): Xaa is C or S
  MOD_RES (12), (13), (14), (15), (16): Xaa is A or G
  MOD_RES (17), (18), (19), (20): Xaa is A or G or is absent

SEQ ID NO: 82240 - protein, 37 aa, Artificial Sequence; identical to SEQ ID NO: 48193
  GFR-binding peptide
  MOD_RES (33), (34): Xaa is C or S
  MOD_RES (11), (12), (13), (14), (15): Xaa is A or G
  MOD_RES (16), (17), (18), (19): Xaa is A or G or is absent

SEQ ID NO: 82241 - protein, 37 aa, Artificial Sequence; identical to SEQ ID NO: 49488
  GFR-binding peptide
  MOD_RES (33), (34): Xaa is C or S
  MOD_RES (11), (12), (13), (14), (15): Xaa is A or G
  MOD_RES (16), (17), (18), (19): Xaa is A or G or is absent

SEQ ID NO: 82242 - protein, 34 aa, Artificial Sequence; identical to SEQ ID NO: 18268
  GFR-binding peptide

SEQ ID NO: 82243 - protein, 32 aa, Artificial Sequence; identical to SEQ ID NO: 48195
  GFR-binding peptide
  MOD_RES (31), (32): Xaa is C or S

SEQ ID NO: 82244 - protein, 34 aa, Artificial Sequence; identical to SEQ ID NO: 46912
  GFR-binding peptide
  MOD_RES (2), (2): Xaa is C or S
  MOD_RES (13), (14), (15), (16), (17): Xaa is A or G
  MOD_RES (18), (19), (20), (21): Xaa is A or G or is absent

SEQ ID NO: 82245 - protein, 37 aa, Artificial Sequence; identical to SEQ ID NO: 18269
  GFR-binding peptide
  MOD_RES (33), (33): Xaa is C or S
  MOD_RES (11), (12), (13), (14), (15): Xaa is A or G
  MOD_RES (16), (17), (18), (19): Xaa is A or G or is absent

SEQ ID NO: 82246 - protein, 36 aa, Artificial Sequence; identical to SEQ ID NO: 48199
  GFR-binding peptide
  MOD_RES (1), (34), (35): Xaa is C or S
  MOD_RES (12), (13), (14), (15), (16): Xaa is A or G
  MOD_RES (17), (18), (19), (20): Xaa is A or G or is absent

SEQ ID NO: 82247 - protein, 39 aa, Artificial Sequence; identical to SEQ ID NO: 18270
  GFR-binding peptide
  MOD_RES (2), (4), (38): Xaa is C or S
  MOD_RES (16), (17), (18), (19), (20): Xaa is A or G
  MOD_RES (21), (22), (23), (24): Xaa is A or G or is absent

SEQ ID NO: 82248 - protein, 40 aa, Artificial Sequence; identical to SEQ ID NO: 18271
  GFR-binding peptide
  MOD_RES (34), (34): Xaa is C or S

SEQ ID NO: 82249 - protein, 39 aa, Artificial Sequence; identical to SEQ ID NO: 17435
  GFR-binding peptide
  MOD_RES (1), (35): Xaa is C or S

SEQ ID NO: 82250 - protein, 35 aa, Artificial Sequence; identical to SEQ ID NO: 18273
  GFR-binding peptide
  MOD_RES (34), (34): Xaa is C or S

SEQ ID NO: 82251 - protein, 41 aa, Artificial Sequence; identical to SEQ ID NO: 17436
  GFR-binding peptide
  MOD_RES (1), (3), (37): Xaa is C or S

SEQ ID NO: 82252 - protein, 31 aa, Artificial Sequence; identical to SEQ ID NO: 48203
  GFR-binding peptide
  MOD_RES (31), (31): Xaa is C or S

SEQ ID NO: 82253 - protein, 38 aa, Artificial Sequence; identical to SEQ ID NO: 18275
  GFR-binding peptide
  MOD_RES (1), (35): Xaa is C or S

SEQ ID NO: 82254 - protein, 38 aa, Artificial Sequence; identical to SEQ ID NO: 18277
  GFR-binding peptide
  MOD_RES (2), (4): Xaa is C or S
  MOD_RES (17), (18), (19), (20), (21): Xaa is A or G
  MOD_RES (22), (23), (24), (25): Xaa is A or G or is absent

SEQ ID NO: 82255 - protein, 35 aa, Artificial Sequence; identical to SEQ ID NO: 18278
  GFR-binding peptide
  MOD_RES (35), (35): Xaa is C or S

SEQ ID NO: 82256 - protein, 38 aa, Artificial Sequence; identical to SEQ ID NO: 17440
  GFR-binding peptide
  MOD_RES (1), (3): Xaa is C or S

SEQ ID NO: 82257 - protein, 39 aa, Artificial Sequence; identical to SEQ ID NO: 18280
  GFR-binding peptide
  MOD_RES (33), (33): Xaa is C or S
  MOD_RES (11), (12), (13), (14), (15): Xaa is A or G
  MOD_RES (16), (17), (18), (19): Xaa is A or G or is absent

SEQ ID NO: 82258 - protein, 39 aa, Artificial Sequence; identical to SEQ ID NO: 49500
  GFR-binding peptide
  MOD_RES (2), (4), (37), (38): Xaa is C or S
  MOD_RES (15), (16), (17), (18), (19): Xaa is A or G
  MOD_RES (20), (21), (22), (23): Xaa is A or G or is absent

SEQ ID NO: 82259 - protein, 36 aa, Artificial Sequence; identical to SEQ ID NO: 18281
  GFR-binding peptide
  MOD_RES (2), (36): Xaa is C or S

SEQ ID NO: 82260 - protein, 40 aa, Artificial Sequence; identical to SEQ ID NO: 17446
  GFR-binding peptide
  MOD_RES (1), (35): Xaa is C or S

SEQ ID NO: 82261 - protein, 35 aa, Artificial Sequence; identical to SEQ ID NO: 50762
  GFR-binding peptide
  MOD_RES (1), (34), (35): Xaa is C or S
  MOD_RES (12), (13), (14), (15), (16): Xaa is A or G
  MOD_RES (17), (18), (19), (20): Xaa is A or G or is absent

SEQ ID NO: 82262 - protein, 39 aa, Artificial Sequence; identical to SEQ ID NO: 17447
  GFR-binding peptide
  MOD_RES (37), (37): Xaa is C or S
  MOD_RES (13), (14), (15), (16), (17): Xaa is A or G
  MOD_RES (18), (19), (20), (21): Xaa is A or G or is absent

SEQ ID NO: 82263 - protein, 35 aa, Artificial Sequence; identical to SEQ ID NO: 18282
  GFR-binding peptide
  MOD_RES (34), (34): Xaa is C or S

SEQ ID NO: 82264 - protein, 37 aa, Artificial Sequence; identical to SEQ ID NO: 46927
  GFR-binding peptide
  MOD_RES (1), (34), (35): Xaa is C or S
  MOD_RES (12), (13), (14), (15), (16): Xaa is A or G
  MOD_RES (17), (18), (19), (20): Xaa is A or G or is absent

SEQ ID NO: 82265 - protein, 41 aa, Artificial Sequence; identical to SEQ ID NO: 48216
  GFR-binding peptide
  MOD_RES (2), (35), (36): Xaa is C or S
  MOD_RES (13), (14), (15), (16), (17): Xaa is A or G
  MOD_RES (18), (19), (20), (21): Xaa is A or G or is absent

SEQ ID NO: 82266 - protein, 30 aa, Artificial Sequence; identical to SEQ ID NO: 49504
  GFR-binding peptide

SEQ ID NO: 82267 - protein, 38 aa, Artificial Sequence; identical to SEQ ID NO: 17449
  GFR-binding peptide
  MOD_RES (1), (3), (37): Xaa is C or S

SEQ ID NO: 82268 - protein, 32 aa, Artificial Sequence; identical to SEQ ID NO: 49509
  GFR-binding peptide
  MOD_RES (1), (32): Xaa is C or S

SEQ ID NO: 82269 - protein, 43 aa, Artificial Sequence; identical to SEQ ID NO: 50764
  GFR-binding peptide
  MOD_RES (2), (4), (37), (38): Xaa is C or S
  MOD_RES (15), (16), (17), (18), (19): Xaa is A or G
  MOD_RES (20), (21), (22), (23): Xaa is A or G or is absent

SEQ ID NO: 82270 - protein, 37 aa, Artificial Sequence; identical to SEQ ID NO: 49513
  GFR-binding peptide
  MOD_RES (2), (4), (37): Xaa is C or S
  MOD_RES (15), (16), (17), (18), (19): Xaa is A or G
  MOD_RES (20), (21), (22), (23): Xaa is A or G or is absent

SEQ ID NO: 82271 - protein, 41 aa, Artificial Sequence; identical to SEQ ID NO: 49514
  GFR-binding peptide
  MOD_RES (2), (4), (37), (38): Xaa is C or S
  MOD_RES (15), (16), (17), (18), (19): Xaa is A or G
  MOD_RES (20), (21), (22), (23): Xaa is A or G or is absent

SEQ ID NO: 82272 - protein, 35 aa, Artificial Sequence; identical to SEQ ID NO: 18290
  GFR-binding peptide
  MOD_RES (33), (33): Xaa is C or S

SEQ ID NO: 82273 - protein, 38 aa, Artificial Sequence; identical to SEQ ID NO: 18292
  GFR-binding peptide
  MOD_RES (1), (3): Xaa is C or S

SEQ ID NO: 82274 - protein, 32 aa, Artificial Sequence; identical to SEQ ID NO: 18294
  GFR-binding peptide
  MOD_RES (11), (12), (13), (14), (15): Xaa is A or G
  MOD_RES (16), (17), (18), (19): Xaa is A or G or is absent

SEQ ID NO: 82275 - protein, 40 aa, Artificial Sequence; identical to SEQ ID NO: 46937
  GFR-binding peptide
  MOD_RES (1), (3), (34), (35): Xaa is C or S

SEQ ID NO: 82276 - protein, 33 aa, Artificial Sequence; identical to SEQ ID NO: 49517
  GFR-binding peptide
  MOD_RES (2), (33): Xaa is C or S

SEQ ID NO: 82277 - protein, 36 aa, Artificial Sequence; identical to SEQ ID NO: 18295
  GFR-binding peptide
  MOD_RES (36), (36): Xaa is C or S

SEQ ID NO: 82278 - protein, 44 aa, Artificial Sequence; identical to SEQ ID NO: 18297
  GFR-binding peptide
  MOD_RES (2), (4), (41): Xaa is C or S
  MOD_RES (17), (18), (19), (20), (21): Xaa is A or G
  MOD_RES (22), (23), (24), (25): Xaa is A or G or is absent

SEQ ID NO: 82279 - protein, 41 aa, Artificial Sequence; identical to SEQ ID NO: 17455
  GFR-binding peptide
  MOD_RES (37), (37): Xaa is C or S
  MOD_RES (13), (14), (15), (16), (17): Xaa is A or G
  MOD_RES (18), (19), (20), (21): Xaa is A or G or is absent

SEQ ID NO: 82280 - protein, 40 aa, Artificial Sequence; identical to SEQ ID NO: 49523
  GFR-binding peptide
  MOD_RES (2), (4), (37), (38): Xaa is C or S
  MOD_RES (15), (16), (17), (18), (19): Xaa is A or G
  MOD_RES (20), (21), (22), (23): Xaa is A or G or is absent

SEQ ID NO: 82281 - protein, 37 aa, Artificial Sequence; identical to SEQ ID NO: 17456
  GFR-binding peptide
  MOD_RES (1), (3), (37): Xaa is C or S

SEQ ID NO: 82282 - protein, 45 aa, Artificial Sequence; identical to SEQ ID NO: 17458
  GFR-binding peptide
  MOD_RES (2), (4), (41): Xaa is C or S
  MOD_RES (17), (18), (19), (20), (21): Xaa is A or G
  MOD_RES (22), (23), (24), (25): Xaa is A or G or is absent

SEQ ID NO: 82283 - protein, 38 aa, Artificial Sequence; identical to SEQ ID NO: 17459
  GFR-binding peptide
  MOD_RES (2), (4): Xaa is C or S
  MOD_RES (17), (18), (19), (20), (21): Xaa is A or G
  MOD_RES (22), (23), (24), (25): Xaa is A or G or is absent

SEQ ID NO: 82284 - protein, 34 aa, Artificial Sequence; identical to SEQ ID NO: 46942
  GFR-binding peptide
  MOD_RES (2), (2): Xaa is C or S
  MOD_RES (13), (14), (15), (16), (17): Xaa is A or G
  MOD_RES (18), (19), (20), (21): Xaa is A or G or is absent

SEQ ID NO: 82285 - protein, 36 aa, Artificial Sequence; identical to SEQ ID NO: 50776
  GFR-binding peptide
  MOD_RES (33), (34): Xaa is C or S
  MOD_RES (11), (12), (13), (14), (15): Xaa is A or G
  MOD_RES (16), (17), (18), (19): Xaa is A or G or is absent

SEQ ID NO: 82286 - protein, 33 aa, Artificial Sequence; identical to SEQ ID NO: 48238
  GFR-binding peptide
  MOD_RES (33), (33): Xaa is C or S
  MOD_RES (11), (12), (13), (14), (15): Xaa is A or G
  MOD_RES (16), (17), (18), (19): Xaa is A or G or is absent

SEQ ID NO: 82287 - protein, 38 aa, Artificial Sequence; identical to SEQ ID NO: 17463
  GFR-binding peptide
  MOD_RES (2), (2): Xaa is C or S

SEQ ID NO: 82288 - protein, 33 aa, Artificial Sequence; identical to SEQ ID NO: 50781
  GFR-binding peptide
  MOD_RES (33), (33): Xaa is C or S
  MOD_RES (11), (12), (13), (14), (15): Xaa is A or G
  MOD_RES (16), (17), (18), (19): Xaa is A or G or is absent

SEQ ID NO: 82289 - protein, 39 aa, Artificial Sequence; identical to SEQ ID NO: 18299
  GFR-binding peptide
  MOD_RES (2), (4), (38): Xaa is C or S
  MOD_RES (16), (17), (18), (19), (20): Xaa is A or G
  MOD_RES (21), (22), (23), (24): Xaa is A or G or is absent

SEQ ID NO: 82290 - protein, 38 aa, Artificial Sequence; identical to SEQ ID NO: 46948
  GFR-binding peptide
  MOD_RES (1), (32), (33): Xaa is C or S

SEQ ID NO: 82291 - protein, 36 aa, Artificial Sequence; identical to SEQ ID NO: 50784
  GFR-binding peptide
  MOD_RES (33), (34): Xaa is C or S
  MOD_RES (11), (12), (13), (14), (15): Xaa is A or G
  MOD_RES (16), (17), (18), (19): Xaa is A or G or is absent

SEQ ID NO: 82292 - protein, 37 aa, Artificial Sequence; identical to SEQ ID NO: 48244
  GFR-binding peptide
  MOD_RES (1), (3), (36), (37): Xaa is C or S
  MOD_RES (14), (15), (16), (17), (18): Xaa is A or G
  MOD_RES (19), (20), (21), (22): Xaa is A or G or is absent

SEQ ID NO: 82293 - protein, 40 aa, Artificial Sequence; identical to SEQ ID NO: 49540
  GFR-binding peptide
  MOD_RES (2), (35), (36): Xaa is C or S
  MOD_RES (13), (14), (15), (16), (17): Xaa is A or G
  MOD_RES (18), (19), (20), (21): Xaa is A or G or is absent

SEQ ID NO: 82294 - protein, 42 aa, Artificial Sequence; identical to SEQ ID NO: 17465
  GFR-binding peptide
  MOD_RES (2), (36): Xaa is C or S

SEQ ID NO: 82295 - protein, 39 aa, Artificial Sequence; identical to SEQ ID NO: 18301
  GFR-binding peptide
  MOD_RES (36), (36): Xaa is C or S
  MOD_RES (12), (13), (14), (15), (16): Xaa is A or G
  MOD_RES (17), (18), (19), (20): Xaa is A or G or is absent

SEQ ID NO: 82296 - protein, 41 aa, Artificial Sequence; identical to SEQ ID NO: 49545
  GFR-binding peptide
  MOD_RES (1), (3), (36), (37): Xaa is C or S
  MOD_RES (14), (15), (16), (17), (18): Xaa is A or G
  MOD_RES (19), (20), (21), (22): Xaa is A or G or is absent

SEQ ID NO: 82297 - protein, 38 aa, Artificial Sequence; identical to SEQ ID NO: 48249
  GFR-binding peptide
  MOD_RES (1), (3), (36), (37): Xaa is C or S
  MOD_RES (14), (15), (16), (17), (18): Xaa is A or G
  MOD_RES (19), (20), (21), (22): Xaa is A or G or is absent

SEQ ID NO: 82298 - protein, 38 aa, Artificial Sequence; identical to SEQ ID NO: 17470
  GFR-binding peptide
  MOD_RES (1), (3): Xaa is C or S

SEQ ID NO: 82299 - protein, 34 aa, Artificial Sequence; identical to SEQ ID NO: 18302
  GFR-binding peptide
  MOD_RES (33), (33): Xaa is C or S
  MOD_RES (11), (12), (13), (14), (15): Xaa is A or G
  MOD_RES (16), (17), (18), (19): Xaa is A or G or is absent

SEQ ID NO: 82300 - protein, 37 aa, Artificial Sequence; identical to SEQ ID NO: 48250
  GFR-binding peptide
  MOD_RES (1), (34), (35): Xaa is C or S
  MOD_RES (12), (13), (14), (15), (16): Xaa is A or G
  MOD_RES (17), (18), (19), (20): Xaa is A or G or is absent

SEQ ID NO: 82301 - protein, 35 aa, Artificial Sequence; identical to SEQ ID NO: 18303
  GFR-binding peptide
  MOD_RES (12), (13), (14), (15), (16): Xaa is A or G
  MOD_RES (17), (18), (19), (20): Xaa is A or G or is absent

SEQ ID NO: 82302 - protein, 33 aa, Artificial Sequence; identical to SEQ ID NO: 49552
  GFR-binding peptide
  MOD_RES (1), (1): Xaa is C or S
  MOD_RES (12), (13), (14), (15), (16): Xaa is A or G
  MOD_RES (17), (18), (19), (20): Xaa is A or G or is absent

SEQ ID NO: 82303 - protein, 43 aa, Artificial Sequence; identical to SEQ ID NO: 18304
  GFR-binding peptide
  MOD_RES (2), (4), (41): Xaa is C or S
  MOD_RES (17), (18), (19), (20), (21): Xaa is A or G
  MOD_RES (22), (23), (24), (25): Xaa is A or G or is absent

SEQ ID NO: 82304 - protein, 39 aa, Artificial Sequence; identical to SEQ ID NO: 49554
  GFR-binding peptide
  MOD_RES (2), (4), (37), (38): Xaa is C or S
  MOD_RES (15), (16), (17), (18), (19): Xaa is A or G
  MOD_RES (20), (21), (22), (23): Xaa is A or G or is absent

SEQ ID NO: 82305 - protein, 39 aa, Artificial Sequence; identical to SEQ ID NO: 17472
  GFR-binding peptide
  MOD_RES (1), (38): Xaa is C or S
  MOD_RES (14), (15), (16), (17), (18): Xaa is A or G
  MOD_RES (19), (20), (21), (22): Xaa is A or G or is absent

SEQ ID NO: 82306 - protein, 40 aa, Artificial Sequence; identical to SEQ ID NO: 17473
  GFR-binding peptide
  MOD_RES (1), (35): Xaa is C or S

SEQ ID NO: 82307 - protein, 37 aa, Artificial Sequence; identical to SEQ ID NO: 49555
  GFR-binding peptide
  MOD_RES (1), (34), (35): Xaa is C or S
  MOD_RES (12), (13), (14), (15), (16): Xaa is A or G
  MOD_RES (17), (18), (19), (20): Xaa is A or G or is absent

SEQ ID NO: 82308 - protein, 38 aa, Artificial Sequence; identical to SEQ ID NO: 50800
  GFR-binding peptide
  MOD_RES (2), (4), (35), (36): Xaa is C or S

SEQ ID NO: 82309 - protein, 34 aa, Artificial Sequence; identical to SEQ ID NO: 48256
  GFR-binding peptide
  MOD_RES (2), (2): Xaa is C or S
  MOD_RES (13), (14), (15), (16), (17): Xaa is A or G
  MOD_RES (18), (19), (20), (21): Xaa is A or G or is absent

SEQ ID NO: 82310 - protein, 40 aa, Artificial Sequence; identical to SEQ ID NO: 48257
  GFR-binding peptide
  MOD_RES (2), (4), (35), (36): Xaa is C or S

SEQ ID NO: 82311 - protein, 34 aa, Artificial Sequence; identical to SEQ ID NO: 50803
  GFR-binding peptide
  MOD_RES (2), (2): Xaa is C or S
  MOD_RES (13), (14), (15), (16), (17): Xaa is A or G
  MOD_RES (18), (19), (20), (21): Xaa is A or G or is absent

SEQ ID NO: 82312 - protein, 39 aa, Artificial Sequence; identical to SEQ ID NO: 17474
  GFR-binding peptide
  MOD_RES (1), (35): Xaa is C or S
  MOD_RES (13), (14), (15), (16), (17): Xaa is A or G
  MOD_RES (18), (19), (20), (21): Xaa is A or G or is absent

SEQ ID NO: 82313 - protein, 42 aa, Artificial Sequence; identical to SEQ ID NO: 17475
  GFR-binding peptide
  MOD_RES (1), (3), (37): Xaa is C or S
  MOD_RES (15), (16), (17), (18), (19): Xaa is A or G
  MOD_RES (20), (21), (22), (23): Xaa is A or G or is absent

SEQ ID NO: 82314 - protein, 41 aa, Artificial Sequence; identical to SEQ ID NO: 48262
  GFR-binding peptide
  MOD_RES (2), (4), (35), (36): Xaa is C or S

SEQ ID NO: 82315 - protein, 39 aa, Artificial Sequence; identical to SEQ ID NO: 17476
  GFR-binding peptide
  MOD_RES (2), (4): Xaa is C or S

SEQ ID NO: 82316 - protein, 33 aa, Artificial Sequence; identical to SEQ ID NO: 17477
  GFR-binding peptide

SEQ ID NO: 82317 - protein, 40 aa, Artificial Sequence; identical to SEQ ID NO: 18307
  GFR-binding peptide
  MOD_RES (2), (36): Xaa is C or S
  MOD_RES (14), (15), (16), (17), (18): Xaa is A or G
  MOD_RES (19), (20), (21), (22): Xaa is A or G or is absent

SEQ ID NO: 82318 - protein, 36 aa, Artificial Sequence; identical to SEQ ID NO: 49566
  GFR-binding peptide
  MOD_RES (1), (3), (34), (35): Xaa is C or S

SEQ ID NO: 82319 - protein, 31 aa, Artificial Sequence; identical to SEQ ID NO: 50808
  GFR-binding peptide
  MOD_RES (31), (31): Xaa is C or S

SEQ ID NO: 82320 - protein, 42 aa, Artificial Sequence; identical to SEQ ID NO: 49568
  GFR-binding peptide
  MOD_RES (2), (4), (37), (38): Xaa is C or S
  MOD_RES (15), (16), (17), (18), (19): Xaa is A or G
  MOD_RES (20), (21), (22), (23): Xaa is A or G or is absent

SEQ ID NO: 82321 - protein, 35 aa, Artificial Sequence; identical to SEQ ID NO: 18308
  GFR-binding peptide
  MOD_RES (2), (2): Xaa is C or S
  MOD_RES (14), (15), (16), (17), (18): Xaa is A or G
  MOD_RES (19), (20), (21), (22): Xaa is A or G or is absent

SEQ ID NO: 82322 - protein, 37 aa, Artificial Sequence; identical to SEQ ID NO: 17481
  GFR-binding peptide
  MOD_RES (1), (1): Xaa is C or S
  MOD_RES (14), (15), (16), (17), (18): Xaa is A or G
  MOD_RES (19), (20), (21), (22): Xaa is A or G or is absent

SEQ ID NO: 82323 - protein, 39 aa, Artificial Sequence; identical to SEQ ID NO: 46978
  GFR-binding peptide
  MOD_RES (2), (4), (35), (36): Xaa is C or S

SEQ ID NO: 82324 - protein, 37 aa, Artificial Sequence; identical to SEQ ID NO: 17483
  GFR-binding peptide
  MOD_RES (33), (33): Xaa is C or S
  MOD_RES (11), (12), (13), (14), (15): Xaa is A or G
  MOD_RES (16), (17), (18), (19): Xaa is A or G or is absent

SEQ ID NO: 82325 - protein, 40 aa, Artificial Sequence; identical to SEQ ID NO: 18309
  GFR-binding peptide
  MOD_RES (2), (36): Xaa is C or S
  MOD_RES (14), (15), (16), (17), (18): Xaa is A or G
  MOD_RES (19), (20), (21), (22): Xaa is A or G or is absent

SEQ ID NO: 82326 - protein, 39 aa, Artificial Sequence; identical to SEQ ID NO: 18310
  GFR-binding peptide
  MOD_RES (1), (3): Xaa is C or S
  MOD_RES (16), (17), (18), (19), (20): Xaa is A or G
  MOD_RES (21), (22), (23), (24): Xaa is A or G or is absent

SEQ ID NO: 82327 - protein, 41 aa, Artificial Sequence; identical to SEQ ID NO: 50811
  GFR-binding peptide
  MOD_RES (1), (3), (36), (37): Xaa is C or S
  MOD_RES (14), (15), (16), (17), (18): Xaa is A or G
  MOD_RES (19), (20), (21), (22): Xaa is A or G or is absent

SEQ ID NO: 82328 - protein, 36 aa, Artificial Sequence; identical to SEQ ID NO: 49576
  GFR-binding peptide
  MOD_RES (1), (3), (34), (35): Xaa is C or S

SEQ ID NO: 82329 - protein, 39 aa, Artificial Sequence; identical to SEQ ID NO: 17484
  GFR-binding peptide
  MOD_RES (1), (35): Xaa is C or S

SEQ ID NO: 82330 - protein, 41 aa, Artificial Sequence; identical to SEQ ID NO: 18311
  GFR-binding peptide
  MOD_RES (37), (37): Xaa is C or S

SEQ ID NO: 82331 - protein, 38 aa, Artificial Sequence; identical to SEQ ID NO: 46981
  GFR-binding peptide
  MOD_RES (2), (4), (37), (38): Xaa is C or S
  MOD_RES (15), (16), (17), (18), (19): Xaa is A or G
  MOD_RES (20), (21), (22), (23): Xaa is A or G or is absent

SEQ ID NO: 82332 - protein, 36 aa, Artificial Sequence; identical to SEQ ID NO: 18312
  GFR-binding peptide
  MOD_RES (13), (14), (15), (16), (17): Xaa is A or G
  MOD_RES (18), (19), (20), (21): Xaa is A or G or is absent

SEQ ID NO: 82333 - protein, 31 aa, Artificial Sequence; identical to SEQ ID NO: 48276
  GFR-binding peptide
  MOD_RES (1), (1): Xaa is C or S

SEQ ID NO: 82334 - protein, 36 aa, Artificial Sequence; identical to SEQ ID NO: 18313
  GFR-binding peptide
  MOD_RES (1), (35): Xaa is C or S
  MOD_RES (13), (14), (15), (16), (17): Xaa is A or G
  MOD_RES (18), (19), (20), (21): Xaa is A or G or is absent

SEQ ID NO: 82335 - protein, 39 aa, Artificial Sequence; identical to SEQ ID NO: 18314
  GFR-binding peptide
  MOD_RES (34), (34): Xaa is C or S

SEQ ID NO: 82336 - protein, 37 aa, Artificial Sequence; identical to SEQ ID NO: 17488
  GFR-binding peptide
  MOD_RES (1), (35): Xaa is C or S
  MOD_RES (13), (14), (15), (16), (17): Xaa is A or G
  MOD_RES (18), (19), (20), (21): Xaa is A or G or is absent

SEQ ID NO: 82337 - protein, 34 aa, Artificial Sequence; identical to SEQ ID NO: 18316
  GFR-binding peptide
  MOD_RES (34), (34): Xaa is C or S
  MOD_RES (12), (13), (14), (15), (16): Xaa is A or G
  MOD_RES (17), (18), (19), (20): Xaa is A or G or is absent

SEQ ID NO: 82338 - protein, 38 aa, Artificial Sequence; identical to SEQ ID NO: 17489
  GFR-binding peptide
  MOD_RES (1), (3), (37): Xaa is C or S

SEQ ID NO: 82339 - protein, 35 aa, Artificial Sequence; identical to SEQ ID NO: 18317
  GFR-binding peptide
  MOD_RES (12), (13), (14), (15), (16): Xaa is A or G
  MOD_RES (17), (18), (19), (20): Xaa is A or G or is absent

SEQ ID NO: 82340 - protein, 30 aa, Artificial Sequence; identical to SEQ ID NO: 48280
  GFR-binding peptide

SEQ ID NO: 82341 - protein, 39 aa, Artificial Sequence; identical to SEQ ID NO: 48281
  GFR-binding peptide
  MOD_RES (1), (3), (36), (37): Xaa is C or S
  MOD_RES (14), (15), (16), (17), (18): Xaa is A or G
  MOD_RES (19), (20), (21), (22): Xaa is A or G or is absent

SEQ ID NO: 82342 - protein, 34 aa, Artificial Sequence; identical to SEQ ID NO: 46992
  GFR-binding peptide
  MOD_RES (31), (32): Xaa is C or S

SEQ ID NO: 82343 - protein, 44 aa, Artificial Sequence; identical to SEQ ID NO: 18319
  GFR-binding peptide
  MOD_RES (2), (4), (38): Xaa is C or S

SEQ ID NO: 82344 - protein, 39 aa, Artificial Sequence; identical to SEQ ID NO: 17492
  GFR-binding peptide
  MOD_RES (2), (36): Xaa is C or S

SEQ ID NO: 82345 - protein, 36 aa, Artificial Sequence; identical to SEQ ID NO: 18320
  GFR-binding peptide
  MOD_RES (36), (36): Xaa is C or S

SEQ ID NO: 82346 - protein, 39 aa, Artificial Sequence; identical to SEQ ID NO: 18321
  GFR-binding peptide
  MOD_RES (1), (3): Xaa is C or S
  MOD_RES (16), (17), (18), (19), (20): Xaa is A or G
  MOD_RES (21), (22), (23), (24): Xaa is A or G or is absent

SEQ ID NO: 82347 - protein, 43 aa, Artificial Sequence; identical to SEQ ID NO: 18328
  GFR-binding peptide
  MOD_RES (1), (3), (40): Xaa is C or S
  MOD_RES (16), (17), (18), (19), (20): Xaa is A or G
  MOD_RES (21), (22), (23), (24): Xaa is A or G or is absent

SEQ ID NO: 82348 - protein, 38 aa, Artificial Sequence; identical to SEQ ID NO: 17494
  GFR-binding peptide
  MOD_RES (2), (4): Xaa is C or S

SEQ ID NO: 82349 - protein, 41 aa, Artificial Sequence; identical to SEQ ID NO: 47002
  GFR-binding peptide
  MOD_RES (1), (3), (36), (37): Xaa is C or S
  MOD_RES (14), (15), (16), (17), (18): Xaa is A or G
  MOD_RES (19), (20), (21), (22): Xaa is A or G or is absent

SEQ ID NO: 82350 - protein, 34 aa, Artificial Sequence; identical to SEQ ID NO: 48294
  GFR-binding peptide
  MOD_RES (31), (32): Xaa is C or S

SEQ ID NO: 82351 - protein, 44 aa, Artificial Sequence; identical to SEQ ID NO: 18331
  GFR-binding peptide
  MOD_RES (2), (4), (38): Xaa is C or S

SEQ ID NO: 82352 - protein, 38 aa, Artificial Sequence; identical to SEQ ID NO: 49598
  GFR-binding peptide
  MOD_RES (2), (4), (37), (38): Xaa is C or S
  MOD_RES (15), (16), (17), (18), (19): Xaa is A or G
  MOD_RES (20), (21), (22), (23): Xaa is A or G or is absent

SEQ ID NO: 82353 - protein, 39 aa, Artificial Sequence; identical to SEQ ID NO: 18332
  GFR-binding peptide
  MOD_RES (2), (39): Xaa is C or S
  MOD_RES (15), (16), (17), (18), (19): Xaa is A or G
  MOD_RES (20), (21), (22), (23): Xaa is A or G or is absent

SEQ ID NO: 82354 - protein, 32 aa, Artificial Sequence; identical to SEQ ID NO: 50836
  GFR-binding peptide
  MOD_RES (31), (32): Xaa is C or S

SEQ ID NO: 82355 - protein, 39 aa, Artificial Sequence; identical to SEQ ID NO: 48297
  GFR-binding peptide
  MOD_RES (1), (3), (36), (37): Xaa is C or S
  MOD_RES (14), (15), (16), (17), (18): Xaa is A or G
  MOD_RES (19), (20), (21), (22): Xaa is A or G or is absent

SEQ ID NO: 82356 - protein, 39 aa, Artificial Sequence; identical to SEQ ID NO: 17498
  GFR-binding peptide
  MOD_RES (34), (34): Xaa is C or S

SEQ ID NO: 82357 - protein, 34 aa, Artificial Sequence; identical to SEQ ID NO: 50838
  GFR-binding peptide
  MOD_RES (2), (4): Xaa is C or S

SEQ ID NO: 82358 - protein, 41 aa, Artificial Sequence; identical to SEQ ID NO: 17499
  GFR-binding peptide
  MOD_RES (2), (36): Xaa is C or S
  MOD_RES (14), (15), (16), (17), (18): Xaa is A or G
  MOD_RES (19), (20), (21), (22): Xaa is A or G or is absent

SEQ ID NO: 82359 - protein, 36 aa, Artificial Sequence; identical to SEQ ID NO: 18334
  GFR-binding peptide
  MOD_RES (1), (1): Xaa is C or S
  MOD_RES (14), (15), (16), (17), (18): Xaa is A or G
  MOD_RES (19), (20), (21), (22): Xaa is A or G or is absent

SEQ ID NO: 82360 - protein, 37 aa, Artificial Sequence; identical to SEQ ID NO: 47017
  GFR-binding peptide
  MOD_RES (2), (35), (36): Xaa is C or S
  MOD_RES (13), (14), (15), (16), (17): Xaa is A or G
  MOD_RES (18), (19), (20), (21): Xaa is A or G or is absent

SEQ ID NO: 82361 - protein, 38 aa, Artificial Sequence; identical to SEQ ID NO: 18335
  GFR-binding peptide
  MOD_RES (2), (36): Xaa is C or S
  MOD_RES (14), (15), (16), (17), (18): Xaa is A or G
  MOD_RES (19), (20), (21), (22): Xaa is A or G or is absent

SEQ ID NO: 82362 - protein, 43 aa, Artificial Sequence; identical to SEQ ID NO: 18336
  GFR-binding peptide
  MOD_RES (1), (3), (40): Xaa is C or S
  MOD_RES (16), (17), (18), (19), (20): Xaa is A or G
  MOD_RES (21), (22), (23), (24): Xaa is A or G or is absent

SEQ ID NO: 82363 - protein, 38 aa, Artificial Sequence; identical to SEQ ID NO: 18337
  GFR-binding peptide
  MOD_RES (1), (35): Xaa is C or S
  MOD_RES (13), (14), (15), (16), (17): Xaa is A or G
  MOD_RES (18), (19), (20), (21): Xaa is A or G or is absent

SEQ ID NO: 82364 - protein, 34 aa, Artificial Sequence; identical to SEQ ID NO: 48310
  GFR-binding peptide
  MOD_RES (1), (32), (33): Xaa is C or S

SEQ ID NO: 82365 - protein, 33 aa, Artificial Sequence; identical to SEQ ID NO: 17505
  GFR-binding peptide

SEQ ID NO: 82366 - protein, 35 aa, Artificial Sequence; identical to SEQ ID NO: 47020
  GFR-binding peptide
  MOD_RES (1), (3), (34), (35): Xaa is C or S

SEQ ID NO: 82367 - protein, 34 aa, Artificial Sequence; identical to SEQ ID NO: 18339
  GFR-binding peptide
  MOD_RES (33), (33): Xaa is C or S

SEQ ID NO: 82368 - protein, 38 aa, Artificial Sequence; identical to SEQ ID NO: 17510
  GFR-binding peptide
  MOD_RES (34), (34): Xaa is C or S
  MOD_RES (12), (13), (14), (15), (16): Xaa is A or G
  MOD_RES (17), (18), (19), (20): Xaa is A or G or is absent

SEQ ID NO: 82369 - protein, 38 aa, Artificial Sequence; identical to SEQ ID NO: 18342
  GFR-binding peptide
  MOD_RES (1), (3): Xaa is C or S

SEQ ID NO: 82370 - protein, 36 aa, Artificial Sequence; identical to SEQ ID NO: 48320
  GFR-binding peptide
  MOD_RES (1), (32), (33): Xaa is C or S

SEQ ID NO: 82371 - protein, 35 aa, Artificial Sequence; identical to SEQ ID NO: 47031
  GFR-binding peptide
  MOD_RES (1), (3), (34), (35): Xaa is C or S

SEQ ID NO: 82372 - protein, 32 aa, Artificial Sequence; identical to SEQ ID NO: 17512
  GFR-binding peptide
  MOD_RES (11), (12), (13), (14), (15): Xaa is A or G
  MOD_RES (16), (17), (18), (19): Xaa is A or G or is absent

SEQ ID NO: 82373 - protein, 40 aa, Artificial Sequence; identical to SEQ ID NO: 17513
  GFR-binding peptide
  MOD_RES (1), (35): Xaa is C or S
  MOD_RES (13), (14), (15), (16), (17): Xaa is A or G
  MOD_RES (18), (19), (20), (21): Xaa is A or G or is absent

SEQ ID NO: 82374 - protein, 36 aa, Artificial Sequence; identical to SEQ ID NO: 18343
  GFR-binding peptide
  MOD_RES (35), (35): Xaa is C or S
  MOD_RES (11), (12), (13), (14), (15): Xaa is A or G
  MOD_RES (16), (17), (18), (19): Xaa is A or G or is absent

SEQ ID NO: 82375 - protein, 42 aa, Artificial Sequence; identical to SEQ ID NO: 18345
  GFR-binding peptide
  MOD_RES (1), (3), (37): Xaa is C or S
  MOD_RES (15), (16), (17), (18), (19): Xaa is A or G
  MOD_RES (20), (21), (22), (23): Xaa is A or G or is absent

SEQ ID NO: 82376 - protein, 36 aa, Artificial Sequence; identical to SEQ ID NO: 48324
  GFR-binding peptide
  MOD_RES (2), (4), (35), (36): Xaa is C or S

SEQ ID NO: 82377 - protein, 35 aa, Artificial Sequence; identical to SEQ ID NO: 17515
  GFR-binding peptide
  MOD_RES (1), (35): Xaa is C or S

SEQ ID NO: 82378 - protein, 38 aa, Artificial Sequence; identical to SEQ ID NO: 18346
  GFR-binding peptide
  MOD_RES (34), (34): Xaa is C or S

SEQ ID NO: 82379 - protein, 40 aa, Artificial Sequence; identical to SEQ ID NO: 17516
  GFR-binding peptide
  MOD_RES (1), (35): Xaa is C or S
  MOD_RES (13), (14), (15), (16), (17): Xaa is A or G
  MOD_RES (18), (19), (20), (21): Xaa is A or G or is absent

SEQ ID NO: 82380 - protein, 35 aa, Artificial Sequence; identical to SEQ ID NO: 18347
  GFR-binding peptide

SEQ ID NO: 82381 - protein, 38 aa, Artificial Sequence; identical to SEQ ID NO: 47035
  GFR-binding peptide
  MOD_RES (1), (3), (34), (35): Xaa is C or S

SEQ ID NO: 82382 - protein, 37 aa, Artificial Sequence; identical to SEQ ID NO: 18348
  GFR-binding peptide
  MOD_RES (1), (1): Xaa is C or S

SEQ ID NO: 82383 - protein, 40 aa, Artificial Sequence; identical to SEQ ID NO: 18349
  GFR-binding peptide
  MOD_RES (2), (39): Xaa is C or S
  MOD_RES (15), (16), (17), (18), (19): Xaa is A or G
  MOD_RES (20), (21), (22), (23): Xaa is A or G or is absent

SEQ ID NO: 82384 - protein, 35 aa, Artificial Sequence; identical to SEQ ID NO: 48326
  GFR-binding peptide
  MOD_RES (2), (4), (35): Xaa is C or S

SEQ ID NO: 82385 - protein, 43 aa, Artificial Sequence; identical to SEQ ID NO: 17518
  GFR-binding peptide
  MOD_RES (2), (39): Xaa is C or S
  MOD_RES (15), (16), (17), (18), (19): Xaa is A or G
  MOD_RES (20), (21), (22), (23): Xaa is A or G or is absent

SEQ ID NO: 82386 - protein, 42 aa, Artificial Sequence; identical to SEQ ID NO: 18350
  GFR-binding peptide
  MOD_RES (1), (3), (40): Xaa is C or S
  MOD_RES (16), (17), (18), (19), (20): Xaa is A or G
  MOD_RES (21), (22), (23), (24): Xaa is A or G or is absent

SEQ ID NO: 82387 - protein, 37 aa, Artificial Sequence; identical to SEQ ID NO: 49630
  GFR-binding peptide
  MOD_RES (2), (4), (37): Xaa is C or S
  MOD_RES (15), (16), (17), (18), (19): Xaa is A or G
  MOD_RES (20), (21), (22), (23): Xaa is A or G or is absent

SEQ ID NO: 82388 - protein, 41 aa, Artificial Sequence; identical to SEQ ID NO: 49631
  GFR-binding peptide
  MOD_RES (2), (4), (35), (36): Xaa is C or S

SEQ ID NO: 82389 - protein, 44 aa, Artificial Sequence; identical to SEQ ID NO: 18351
  GFR-binding peptide
  MOD_RES (1), (3), (40): Xaa is C or S
  MOD_RES (16), (17), (18), (19), (20): Xaa is A or G
  MOD_RES (21), (22), (23), (24): Xaa is A or G or is absent

SEQ ID NO: 82390 - protein, 34 aa, Artificial Sequence; identical to SEQ ID NO: 49633
  GFR-binding peptide
  MOD_RES (1), (34): Xaa is C or S
  MOD_RES (12), (13), (14), (15), (16): Xaa is A or G
  MOD_RES (17), (18), (19), (20): Xaa is A or G or is absent

SEQ ID NO: 82391 - protein, 34 aa, Artificial Sequence; identical to SEQ ID NO: 47039
  GFR-binding peptide
  MOD_RES (1), (3), (34): Xaa is C or S

SEQ ID NO: 82392 - protein, 33 aa, Artificial Sequence; identical to SEQ ID NO: 17521
  GFR-binding peptide
  MOD_RES (33), (33): Xaa is C or S
  MOD_RES (11), (12), (13), (14), (15): Xaa is A or G
  MOD_RES (16), (17), (18), (19): Xaa is A or G or is absent

SEQ ID NO: 82393 - protein, 34 aa, Artificial Sequence; identical to SEQ ID NO: 50866
  GFR-binding peptide
  MOD_RES (1), (3), (34): Xaa is C or S

SEQ ID NO: 82394 - protein, 33 aa, Artificial Sequence; identical to SEQ ID NO: 17523
  GFR-binding peptide
  MOD_RES (11), (12), (13), (14), (15): Xaa is A or G
  MOD_RES (16), (17), (18), (19): Xaa is A or G or is absent

SEQ ID NO: 82395 - protein, 37 aa, Artificial Sequence; identical to SEQ ID NO: 17525
  GFR-binding peptide
  MOD_RES (33), (33): Xaa is C or S

SEQ ID NO: 82396 - protein, 34 aa, Artificial Sequence; identical to SEQ ID NO: 50869
  GFR-binding peptide
  MOD_RES (1), (34): Xaa is C or S
  MOD_RES (12), (13), (14), (15), (16): Xaa is A or G
  MOD_RES (17), (18), (19), (20): Xaa is A or G or is absent

SEQ ID NO: 82397 - protein, 40 aa, Artificial Sequence; identical to SEQ ID NO: 17526
  GFR-binding peptide
  MOD_RES (2), (4), (38): Xaa is C or S
  MOD_RES (16), (17), (18), (19), (20): Xaa is A or G
  MOD_RES (21), (22), (23), (24): Xaa is A or G or is absent

SEQ ID NO: 82398 - protein, 37 aa, Artificial Sequence; identical to SEQ ID NO: 17528
  GFR-binding peptide
  MOD_RES (37), (37): Xaa is C or S

SEQ ID NO: 82399 - protein, 40 aa, Artificial Sequence; identical to SEQ ID NO: 49644
  GFR-binding peptide
  MOD_RES (1), (34), (35): Xaa is C or S
  MOD_RES (12), (13), (14), (15), (16): Xaa is A or G
  MOD_RES (17), (18), (19), (20): Xaa is A or G or is absent

SEQ ID NO: 82400 - protein, 38 aa, Artificial Sequence; identical to SEQ ID NO: 18354
  GFR-binding peptide
  MOD_RES (33), (33): Xaa is C or S
  MOD_RES (11), (12), (13), (14), (15): Xaa is A or G
  MOD_RES (16), (17), (18), (19): Xaa is A or G or is absent

SEQ ID NO: 82401 - protein, 39 aa, Artificial Sequence; identical to SEQ ID NO: 18356
  GFR-binding peptide
  MOD_RES (2), (4), (38): Xaa is C or S
  MOD_RES (16), (17), (18), (19), (20): Xaa is A or G
  MOD_RES (21), (22), (23), (24): Xaa is A or G or is absent

SEQ ID NO: 82402 - protein, 35 aa, Artificial Sequence; identical to SEQ ID NO: 18357
  GFR-binding peptide
  MOD_RES (33), (33): Xaa is C or S
  MOD_RES (11), (12), (13), (14), (15): Xaa is A or G
  MOD_RES (16), (17), (18), (19): Xaa is A or G or is absent

SEQ ID NO: 82403 - protein, 39 aa, Artificial Sequence; identical to SEQ ID NO: 47057
  GFR-binding peptide
  MOD_RES (33), (34): Xaa is C or S
  MOD_RES (11), (12), (13), (14), (15): Xaa is A or G
  MOD_RES (16), (17), (18), (19): Xaa is A or G or is absent

SEQ ID NO: 82404 - protein, 34 aa, Artificial Sequence; identical to SEQ ID NO: 18359
  GFR-binding peptide
  MOD_RES (34), (34): Xaa is C or S

SEQ ID NO: 82405 - protein, 39 aa, Artificial Sequence; identical to SEQ ID NO: 18360
  GFR-binding peptide
  MOD_RES (37), (37): Xaa is C or S

SEQ ID NO: 82406 - protein, 42 aa, Artificial Sequence; identical to SEQ ID NO: 17533
  GFR-binding peptide
  MOD_RES (2), (39): Xaa is C or S
  MOD_RES (15), (16), (17), (18), (19): Xaa is A or G
  MOD_RES (20), (21), (22), (23): Xaa is A or G or is absent

SEQ ID NO: 82407 - protein, 40 aa, Artificial Sequence; identical to SEQ ID NO: 18361
  GFR-binding peptide
  MOD_RES (1), (38): Xaa is C or S

SEQ ID NO: 82408 - protein, 36 aa, Artificial Sequence; identical to SEQ ID NO: 17535
  GFR-binding peptide
  MOD_RES (33), (33): Xaa is C or S

SEQ ID NO: 82409 - protein, 37 aa, Artificial Sequence; identical to SEQ ID NO: 17537
  GFR-binding peptide
  MOD_RES (36), (36): Xaa is C or S

SEQ ID NO: 82410 - protein, 42 aa, Artificial Sequence; identical to SEQ ID NO: 18365
  GFR-binding peptide
  MOD_RES (1), (3), (40): Xaa is C or S
  MOD_RES (16), (17), (18), (19), (20): Xaa is A or G
  MOD_RES (21), (22), (23), (24): Xaa is A or G or is absent

SEQ ID NO: 82411 - protein, 37 aa, Artificial Sequence; identical to SEQ ID NO: 18366
  GFR-binding peptide
  MOD_RES (1), (1): Xaa is C or S

SEQ ID NO: 82412 - protein, 37 aa, Artificial Sequence; identical to SEQ ID NO: 17538
  GFR-binding peptide
  MOD_RES (1), (1): Xaa is C or S

SEQ ID NO: 82413 - protein, 36 aa, Artificial Sequence; identical to SEQ ID NO: 18367
  GFR-binding peptide
  MOD_RES (2), (36): Xaa is C or S

SEQ ID NO: 82414 - protein, 39 aa, Artificial Sequence; identical to SEQ ID NO: 18368
  GFR-binding peptide
  MOD_RES (2), (39): Xaa is C or S
  MOD_RES (15), (16), (17), (18), (19): Xaa is A or G
  MOD_RES (20), (21), (22), (23): Xaa is A or G or is absent

SEQ ID NO: 82415 - protein, 40 aa, Artificial Sequence; identical to SEQ ID NO: 47074
  GFR-binding peptide
  MOD_RES (2), (4), (35), (36): Xaa is C or S

SEQ ID NO: 82416 - protein, 35 aa, Artificial Sequence; identical to SEQ ID NO: 18369
  GFR-binding peptide
  MOD_RES (34), (34): Xaa is C or S
  MOD_RES (12), (13), (14), (15), (16): Xaa is A or G
  MOD_RES (17), (18), (19), (20): Xaa is A or G or is absent

SEQ ID NO: 82417 - protein, 40 aa, Artificial Sequence; identical to SEQ ID NO: 18372
  GFR-binding peptide
  MOD_RES (1), (38): Xaa is C or S

SEQ ID NO: 82418 - protein, 37 aa, Artificial Sequence; identical to SEQ ID NO: 17540
  GFR-binding peptide
  MOD_RES (1), (3), (37): Xaa is C or S

SEQ ID NO: 82419 - protein, 39 aa, Artificial Sequence; identical to SEQ ID NO: 49662
  GFR-binding peptide
  MOD_RES (2), (4), (37), (38): Xaa is C or S
  MOD_RES (15), (16), (17), (18), (19): Xaa is A or G
  MOD_RES (20), (21), (22), (23): Xaa is A or G or is absent

SEQ ID NO: 82420 - protein, 33 aa, Artificial Sequence; identical to SEQ ID NO: 50881
  GFR-binding peptide
  MOD_RES (1), (1): Xaa is C or S
  MOD_RES (12), (13), (14), (15), (16): Xaa is A or G
  MOD_RES (17), (18), (19), (20): Xaa is A or G or is absent

SEQ ID NO: 82421 - protein, 35 aa, Artificial Sequence; identical to SEQ ID NO: 49664
  GFR-binding peptide
  MOD_RES (2), (4), (35): Xaa is C or S

SEQ ID NO: 82422 - protein, 38 aa, Artificial Sequence; identical to SEQ ID NO: 49666
  GFR-binding peptide
  MOD_RES (33), (34): Xaa is C or S
  MOD_RES (11), (12), (13), (14), (15): Xaa is A or G
  MOD_RES (16), (17), (18), (19): Xaa is A or G or is absent

SEQ ID NO: 82423 - protein, 36 aa, Artificial Sequence; identical to SEQ ID NO: 18373
  GFR-binding peptide
  MOD_RES (35), (35): Xaa is C or S

SEQ ID NO: 82424 - protein, 36 aa, Artificial Sequence; identical to SEQ ID NO: 49671
  GFR-binding peptide
  MOD_RES (1), (3), (36): Xaa is C or S
  MOD_RES (14), (15), (16), (17), (18): Xaa is A or G
  MOD_RES (19), (20), (21), (22): Xaa is A or G or is absent

SEQ ID NO: 82425 - protein, 33 aa, Artificial Sequence; identical to SEQ ID NO: 50887
  GFR-binding peptide
  MOD_RES (1), (3): Xaa is C or S

SEQ ID NO: 82426 - protein, 37 aa, Artificial Sequence; identical to SEQ ID NO: 48368
  GFR-binding peptide
  MOD_RES (2), (4), (37): Xaa is C or S
  MOD_RES (15), (16), (17), (18), (19): Xaa is A or G
  MOD_RES (20), (21), (22), (23): Xaa is A or G or is absent

SEQ ID NO: 82427 - protein, 43 aa, Artificial Sequence; identical to SEQ ID NO: 18377
  GFR-binding peptide
  MOD_RES (1), (3), (37): Xaa is C or S

SEQ ID NO: 82428 - protein, 36 aa, Artificial Sequence; identical to SEQ ID NO: 17545
  GFR-binding peptide
  MOD_RES (33), (33): Xaa is C or S

SEQ ID NO: 82429 - protein, 44 aa, Artificial Sequence; identical to SEQ ID NO: 18380
  GFR-binding peptide
  MOD_RES (2), (4), (38): Xaa is C or S
  MOD_RES (16), (17), (18), (19), (20): Xaa is A or G
  MOD_RES (21), (22), (23), (24): Xaa is A or G or is absent

SEQ ID NO: 82430 - protein, 40 aa, Artificial Sequence; identical to SEQ ID NO: 48369
  GFR-binding peptide
  MOD_RES (1), (3), (34), (35): Xaa is C or S

SEQ ID NO: 82431 - protein, 37 aa, Artificial Sequence; identical to SEQ ID NO: 48370
  GFR-binding peptide
  MOD_RES (1), (3), (36), (37): Xaa is C or S
  MOD_RES (14), (15), (16), (17), (18): Xaa is A or G
  MOD_RES (19), (20), (21), (22): Xaa is A or G or is absent

SEQ ID NO: 82432 - protein, 36 aa, Artificial Sequence; identical to SEQ ID NO: 47088
  GFR-binding peptide
  MOD_RES (1), (32), (33): Xaa is C or S

SEQ ID NO: 82433 - protein, 37 aa, Artificial Sequence; identical to SEQ ID NO: 18382
  GFR-binding peptide
  MOD_RES (37), (37): Xaa is C or S

SEQ ID NO: 82434 - protein, 33 aa, Artificial Sequence; identical to SEQ ID NO: 18383
  GFR-binding peptide

SEQ ID NO: 82435 - protein, 34 aa, Artificial Sequence; identical to SEQ ID NO: 49676
  GFR-binding peptide
  MOD_RES (2), (4): Xaa is C or S

SEQ ID NO: 82436 - protein, 35 aa, Artificial Sequence; identical to SEQ ID NO: 17547
  GFR-binding peptide
  MOD_RES (2), (2): Xaa is C or S
  MOD_RES (14), (15), (16), (17), (18): Xaa is A or G
  MOD_RES (19), (20), (21), (22): Xaa is A or G or is absent

SEQ ID NO: 82437 - protein, 33 aa, Artificial Sequence; identical to SEQ ID NO: 48375
  GFR-binding peptide
  MOD_RES (33), (33): Xaa is C or S
  MOD_RES (11), (12), (13), (14), (15): Xaa is A or G
  MOD_RES (16), (17), (18), (19): Xaa is A or G or is absent

SEQ ID NO: 82438 - protein, 31 aa, Artificial Sequence; identical to SEQ ID NO: 49680
  GFR-binding peptide
  MOD_RES (1), (1): Xaa is C or S

SEQ ID NO: 82439 - protein, 34 aa, Artificial Sequence; identical to SEQ ID NO: 18387
  GFR-binding peptide
  MOD_RES (13), (14), (15), (16), (17): Xaa is A or G
  MOD_RES (18), (19), (20), (21): Xaa is A or G or is absent

SEQ ID NO: 82440 - protein, 33 aa, Artificial Sequence; identical to SEQ ID NO: 18388
  GFR-binding peptide

SEQ ID NO: 82441 - protein, 43 aa, Artificial Sequence; identical to SEQ ID NO: 17553
  GFR-binding peptide
  MOD_RES (2), (39): Xaa is C or S

SEQ ID NO: 82442 - protein, 44 aa, Artificial Sequence; identical to SEQ ID NO: 18390
  GFR-binding peptide
  MOD_RES (2), (4), (41): Xaa is C or S

SEQ ID NO: 82443 - protein, 37 aa, Artificial Sequence; identical to SEQ ID NO: 17554
  GFR-binding peptide
  MOD_RES (34), (34): Xaa is C or S

SEQ ID NO: 82444 - protein, 31 aa, Artificial Sequence; identical to SEQ ID NO: 48387
  GFR-binding peptide
  MOD_RES (31), (31): Xaa is C or S

SEQ ID NO: 82445 - protein, 37 aa, Artificial Sequence; identical to SEQ ID NO: 17555
  GFR-binding peptide
  MOD_RES (1), (3), (37): Xaa is C or S

SEQ ID NO: 82446 - protein, 40 aa, Artificial Sequence; identical to SEQ ID NO: 48388
  GFR-binding peptide
  MOD_RES (2), (4), (37), (38): Xaa is C or S
  MOD_RES (15), (16), (17), (18), (19): Xaa is A or G
  MOD_RES (20), (21), (22), (23): Xaa is A or G or is absent

SEQ ID NO: 82447 - protein, 43 aa, Artificial Sequence; identical to SEQ ID NO: 18394
  GFR-binding peptide
  MOD_RES (1), (3), (40): Xaa is C or S
  MOD_RES (16), (17), (18), (19), (20): Xaa is A or G
  MOD_RES (21), (22), (23), (24): Xaa is A or G or is absent

SEQ ID NO: 82448 - protein, 41 aa, Artificial Sequence; identical to SEQ ID NO: 17558
  GFR-binding peptide
  MOD_RES (37), (37): Xaa is C or S

SEQ ID NO: 82449 - protein, 41 aa, Artificial Sequence; identical to SEQ ID NO: 18395
  GFR-binding peptide
  MOD_RES (1), (3), (37): Xaa is C or S
  MOD_RES (15), (16), (17), (18), (19): Xaa is A or G
  MOD_RES (20), (21), (22), (23): Xaa is A or G or is absent

SEQ ID NO: 82450 - protein, 38 aa, Artificial Sequence; identical to SEQ ID NO: 48389
  GFR-binding peptide
  MOD_RES (2), (35), (36): Xaa is C or S
  MOD_RES (13), (14), (15), (16), (17): Xaa is A or G
  MOD_RES (18), (19), (20), (21): Xaa is A or G or is absent

SEQ ID NO: 82451 - protein, 35 aa, Artificial Sequence; identical to SEQ ID NO: 17561
  GFR-binding peptide
  MOD_RES (1), (35): Xaa is C or S
  MOD_RES (13), (14), (15), (16), (17): Xaa is A or G
  MOD_RES (18), (19), (20), (21): Xaa is A or G or is absent

SEQ ID NO: 82452 - protein, 44 aa, Artificial Sequence; identical to SEQ ID NO: 17562
  GFR-binding peptide
  MOD_RES (2), (4), (38): Xaa is C or S

SEQ ID NO: 82453 - protein, 33 aa, Artificial Sequence; identical to SEQ ID NO: 49696
  GFR-binding peptide
  MOD_RES (1), (3): Xaa is C or S

SEQ ID NO: 82454 - protein, 39 aa, Artificial Sequence; identical to SEQ ID NO: 17564
  GFR-binding peptide
  MOD_RES (2), (4), (38): Xaa is C or S
  MOD_RES (16), (17), (18), (19), (20): Xaa is A or G
  MOD_RES (21), (22), (23), (24): Xaa is A or G or is absent

SEQ ID NO: 82455 - protein, 36 aa, Artificial Sequence; identical to SEQ ID NO: 17565
  GFR-binding peptide
  MOD_RES (2), (2): Xaa is C or S
  MOD_RES (15), (16), (17), (18), (19): Xaa is A or G
  MOD_RES (20), (21), (22), (23): Xaa is A or G or is absent

SEQ ID NO: 82456 - protein, 40 aa, Artificial Sequence; identical to SEQ ID NO: 18399
  GFR-binding peptide
  MOD_RES (34), (34): Xaa is C or S

SEQ ID NO: 82457 - protein, 35 aa, Artificial Sequence; identical to SEQ ID NO: 48396
  GFR-binding peptide
  MOD_RES (1), (3): Xaa is C or S
  MOD_RES (14), (15), (16), (17), (18): Xaa is A or G
  MOD_RES (19), (20), (21), (22): Xaa is A or G or is absent

SEQ ID NO: 82458 - protein, 35 aa, Artificial Sequence; identical to SEQ ID NO: 18400
  GFR-binding peptide

SEQ ID NO: 82459 - protein, 39 aa, Artificial Sequence; identical to SEQ ID NO: 18401
  GFR-binding peptide
  MOD_RES (35), (35): Xaa is C or S

SEQ ID NO: 82460 - protein, 35 aa, Artificial Sequence; identical to SEQ ID NO: 17568
  GFR-binding peptide
  MOD_RES (1), (35): Xaa is C or S

SEQ ID NO: 82461 - protein, 43 aa, Artificial Sequence; identical to SEQ ID NO: 47116
  GFR-binding peptide
  MOD_RES (2), (4), (37), (38): Xaa is C or S
  MOD_RES (15), (16), (17), (18), (19): Xaa is A or G
  MOD_RES (20), (21), (22), (23): Xaa is A or G or is absent

SEQ ID NO: 82462 - protein, 42 aa, Artificial Sequence; identical to SEQ ID NO: 18402
  GFR-binding peptide
  MOD_RES (1), (3), (40): Xaa is C or S

SEQ ID NO: 82463 - protein, 37 aa, Artificial Sequence; identical to SEQ ID NO: 17569
  GFR-binding peptide
  MOD_RES (1), (1): Xaa is C or S

SEQ ID NO: 82464 - protein, 45 aa, Artificial Sequence; identical to SEQ ID NO: 17570
  GFR-binding peptide
  MOD_RES (2), (4), (41): Xaa is C or S

SEQ ID NO: 82465 - protein, 33 aa, Artificial Sequence; identical to SEQ ID NO: 47121
  GFR-binding peptide
  MOD_RES (1), (3): Xaa is C or S

SEQ ID NO: 82466 - protein, 37 aa, Artificial Sequence; identical to SEQ ID NO: 18403
  GFR-binding peptide
  MOD_RES (2), (2): Xaa is C or S
  MOD_RES (15), (16), (17), (18), (19): Xaa is A or G
  MOD_RES (20), (21), (22), (23): Xaa is A or G or is absent

SEQ ID NO: 82467 - protein, 36 aa, Artificial Sequence; identical to SEQ ID NO: 18404
  GFR-binding peptide

SEQ ID NO: 82468 - protein, 40 aa, Artificial Sequence; identical to SEQ ID NO: 17572
  GFR-binding peptide
  MOD_RES (1), (38): Xaa is C or S
  MOD_RES (14), (15), (16), (17), (18): Xaa is A or G
  MOD_RES (19), (20), (21), (22): Xaa is A or G or is absent

SEQ ID NO: 82469 - protein, 35 aa, Artificial Sequence; identical to SEQ ID NO: 18408
  GFR-binding peptide
  MOD_RES (33), (33): Xaa is C or S
  MOD_RES (11), (12), (13), (14), (15): Xaa is A or G
  MOD_RES (16), (17), (18), (19): Xaa is A or G or is absent

SEQ ID NO: 82470 - protein, 34 aa, Artificial Sequence; identical to SEQ ID NO: 18410
  GFR-binding peptide
  MOD_RES (13), (14), (15), (16), (17): Xaa is A or G
  MOD_RES (18), (19), (20), (21): Xaa is A or G or is absent

SEQ ID NO: 82471 - protein, 39 aa, Artificial Sequence; identical to SEQ ID NO: 48407
  GFR-binding peptide
  MOD_RES (2), (4), (35), (36): Xaa is C or S

SEQ ID NO: 82472 - protein, 40 aa, Artificial Sequence; identical to SEQ ID NO: 17573
  GFR-binding peptide
  MOD_RES (1), (3), (40): Xaa is C or S

SEQ ID NO: 82473 - protein, 38 aa, Artificial Sequence; identical to SEQ ID NO: 18411
  GFR-binding peptide
  MOD_RES (36), (36): Xaa is C or S
  MOD_RES (12), (13), (14), (15), (16): Xaa is A or G
  MOD_RES (17), (18), (19), (20): Xaa is A or G or is absent

SEQ ID NO: 82474 - protein, 38 aa, Artificial Sequence; identical to SEQ ID NO: 50927
  GFR-binding peptide
  MOD_RES (2), (4), (37), (38): Xaa is C or S
  MOD_RES (15), (16), (17), (18), (19): Xaa is A or G
  MOD_RES (20), (21), (22), (23): Xaa is A or G or is absent

SEQ ID NO: 82475 - protein, 31 aa, Artificial Sequence; identical to SEQ ID NO: 47127
  GFR-binding peptide
  MOD_RES (1), (1): Xaa is C or S

SEQ ID NO: 82476 - protein, 39 aa, Artificial Sequence; identical to SEQ ID NO: 48413
  GFR-binding peptide
  MOD_RES (1), (34), (35): Xaa is C or S
  MOD_RES (12), (13), (14), (15), (16): Xaa is A or G
  MOD_RES (17), (18), (19), (20): Xaa is A or G or is absent

SEQ ID NO: 82477 - protein, 36 aa, Artificial Sequence; identical to SEQ ID NO: 17575
  GFR-binding peptide
  MOD_RES (34), (34): Xaa is C or S
  MOD_RES (12), (13), (14), (15), (16): Xaa is A or G
  MOD_RES (17), (18), (19), (20): Xaa is A or G or is absent

SEQ ID NO: 82478 - protein, 33 aa, Artificial Sequence; identical to SEQ ID NO: 17576
  GFR-binding peptide
  MOD_RES (33), (33): Xaa is C or S
  MOD_RES (11), (12), (13), (14), (15): Xaa is A or G
  MOD_RES (16), (17), (18), (19): Xaa is A or G or is absent

SEQ ID NO: 82479 - protein, 37 aa, Artificial Sequence; identical to SEQ ID NO: 47129
  GFR-binding peptide
  MOD_RES (1), (32), (33): Xaa is C or S

SEQ ID NO: 82480 - protein, 41 aa, Artificial Sequence; identical to SEQ ID NO: 47131
  GFR-binding peptide
  MOD_RES (2), (4), (35), (36): Xaa is C or S

SEQ ID NO: 82481 - protein, 40 aa, Artificial Sequence; identical to SEQ ID NO: 50928
  GFR-binding peptide
  MOD_RES (1), (34), (35): Xaa is C or S
  MOD_RES (12), (13), (14), (15), (16): Xaa is A or G
  MOD_RES (17), (18), (19), (20): Xaa is A or G or is absent

SEQ ID NO: 82482 - protein, 45 aa, Artificial Sequence; identical to SEQ ID NO: 17577
  GFR-binding peptide
  MOD_RES (2), (4), (41): Xaa is C or S
  MOD_RES (17), (18), (19), (20), (21): Xaa is A or G
  MOD_RES (22), (23), (24), (25): Xaa is A or G or is absent

SEQ ID NO: 82483 - protein, 38 aa, Artificial Sequence; identical to SEQ ID NO: 18412
  GFR-binding peptide
  MOD_RES (36), (36): Xaa is C or S

SEQ ID NO: 82484 - protein, 40 aa, Artificial Sequence; identical to SEQ ID NO: 18413
  GFR-binding peptide
  MOD_RES (2), (4): Xaa is C or S
  MOD_RES (17), (18), (19), (20), (21): Xaa is A or G
  MOD_RES (22), (23), (24), (25): Xaa is A or G or is absent

SEQ ID NO: 82485 - protein, 44 aa, Artificial Sequence; identical to SEQ ID NO: 18414
  GFR-binding peptide
  MOD_RES (1), (3), (40): Xaa is C or S
  MOD_RES (16), (17), (18), (19), (20): Xaa is A or G
  MOD_RES (21), (22), (23), (24): Xaa is A or G or is absent

SEQ ID NO: 82486 - protein, 34 aa, Artificial Sequence; identical to SEQ ID NO: 50936
  GFR-binding peptide
  MOD_RES (33), (34): Xaa is C or S
  MOD_RES (11), (12), (13), (14), (15): Xaa is A or G
  MOD_RES (16), (17), (18), (19): Xaa is A or G or is absent

SEQ ID NO: 82487 - protein, 38 aa, Artificial Sequence; identical to SEQ ID NO: 17581
  GFR-binding peptide
  MOD_RES (2), (2): Xaa is C or S
  MOD_RES (15), (16), (17), (18), (19): Xaa is A or G
  MOD_RES (20), (21), (22), (23): Xaa is A or G or is absent

SEQ ID NO: 82488 - protein, 40 aa, Artificial Sequence; identical to SEQ ID NO: 18417
  GFR-binding peptide
  MOD_RES (2), (39): Xaa is C or S

SEQ ID NO: 82489 - protein, 42 aa, Artificial Sequence; identical to SEQ ID NO: 49719
  GFR-binding peptide
  MOD_RES (2), (4), (37), (38): Xaa is C or S
  MOD_RES (15), (16), (17), (18), (19): Xaa is A or G
  MOD_RES (20), (21), (22), (23): Xaa is A or G or is absent

SEQ ID NO: 82490 - protein, 37 aa, Artificial Sequence; identical to SEQ ID NO: 48424
  GFR-binding peptide
  MOD_RES (2), (4), (35), (36): Xaa is C or S

SEQ ID NO: 82491 - protein, 36 aa, Artificial Sequence; identical to SEQ ID NO: 48428
  GFR-binding peptide
  MOD_RES (1), (34), (35): Xaa is C or S
  MOD_RES (12), (13), (14), (15), (16): Xaa is A or G
  MOD_RES (17), (18), (19), (20): Xaa is A or G or is absent

SEQ ID NO: 82492 - protein, 35 aa, Artificial Sequence; identical to SEQ ID NO: 47145
  GFR-binding peptide
  MOD_RES (2), (35): Xaa is C or S
  MOD_RES (13), (14), (15), (16), (17): Xaa is A or G
  MOD_RES (18), (19), (20), (21): Xaa is A or G or is absent

SEQ ID NO: 82493 - protein, 37 aa, Artificial Sequence; identical to SEQ ID NO: 17582
  GFR-binding peptide
  MOD_RES (36), (36): Xaa is C or S
  MOD_RES (12), (13), (14), (15), (16): Xaa is A or G
  MOD_RES (17), (18), (19), (20): Xaa is A or G or is absent

SEQ ID NO: 82494 - protein, 38 aa, Artificial Sequence; identical to SEQ ID NO: 17584
  GFR-binding peptide
  MOD_RES (37), (37): Xaa is C or S
  MOD_RES (13), (14), (15), (16), (17): Xaa is A or G
  MOD_RES (18), (19), (20), (21): Xaa is A or G or is absent

SEQ ID NO: 82495 - protein, 38 aa, Artificial Sequence; identical to SEQ ID NO: 17585
  GFR-binding peptide
  MOD_RES (35), (35): Xaa is C or S

SEQ ID NO: 82496 - protein, 37 aa, Artificial Sequence; identical to SEQ ID NO: 18421
  GFR-binding peptide
  MOD_RES (1), (3), (37): Xaa is C or S
  MOD_RES (15), (16), (17), (18), (19): Xaa is A or G
  MOD_RES (20), (21), (22), (23): Xaa is A or G or is absent

SEQ ID NO: 82497 - protein, 43 aa, Artificial Sequence; identical to SEQ ID NO: 18422
  GFR-binding peptide
  MOD_RES (2), (4), (41): Xaa is C or S

SEQ ID NO: 82498 - protein, 40 aa, Artificial Sequence; identical to SEQ ID NO: 17589
  GFR-binding peptide
  MOD_RES (2), (4), (38): Xaa is C or S

SEQ ID NO: 82499 - protein, 38 aa, Artificial Sequence; identical to SEQ ID NO: 47160
  GFR-binding peptide
  MOD_RES (1), (34), (35): Xaa is C or S
  MOD_RES (12), (13), (14), (15), (16): Xaa is A or G
  MOD_RES (17), (18), (19), (20): Xaa is A or G or is absent

SEQ ID NO: 82500 - protein, 41 aa, Artificial Sequence; identical to SEQ ID NO: 17592
  GFR-binding peptide
  MOD_RES (1), (38): Xaa is C or S
  MOD_RES (14), (15), (16), (17), (18): Xaa is A or G
  MOD_RES (19), (20), (21), (22): Xaa is A or G or is absent

SEQ ID NO: 82501 - protein, 35 aa, Artificial Sequence; identical to SEQ ID NO: 50950
  GFR-binding peptide
  MOD_RES (1), (32), (33): Xaa is C or S

SEQ ID NO: 82502 - protein, 37 aa, Artificial Sequence; identical to SEQ ID NO: 50951
  GFR-binding peptide
  MOD_RES (1), (3), (34), (35): Xaa is C or S

SEQ ID NO: 82503 - protein, 38 aa, Artificial Sequence; identical to SEQ ID NO: 18423
  GFR-binding peptide
  MOD_RES (33), (33): Xaa is C or S
  MOD_RES (11), (12), (13), (14), (15): Xaa is A or G
  MOD_RES (16), (17), (18), (19): Xaa is A or G or is absent

SEQ ID NO: 82504 - protein, 37 aa, Artificial Sequence; identical to SEQ ID NO: 48436
  GFR-binding peptide
  MOD_RES (1), (3), (36), (37): Xaa is C or S
  MOD_RES (14), (15), (16), (17), (18): Xaa is A or G
  MOD_RES (19), (20), (21), (22): Xaa is A or G or is absent

SEQ ID NO: 82505 - protein, 33 aa, Artificial Sequence; identical to SEQ ID NO: 47163
  GFR-binding peptide
  MOD_RES (1), (32), (33): Xaa is C or S

SEQ ID NO: 82506 - protein, 41 aa, Artificial Sequence; identical to SEQ ID NO: 18426
  GFR-binding peptide
  MOD_RES (1), (3), (37): Xaa is C or S
  MOD_RES (15), (16), (17), (18), (19): Xaa is A or G
  MOD_RES (20), (21), (22), (23): Xaa is A or G or is absent

SEQ ID NO: 82507 - protein, 41 aa, Artificial Sequence; identical to SEQ ID NO: 18427
  GFR-binding peptide
  MOD_RES (2), (4), (38): Xaa is C or S

SEQ ID NO: 82508 - protein, 36 aa, Artificial Sequence; identical to SEQ ID NO: 17593
  GFR-binding peptide
  MOD_RES (1), (1): Xaa is C or S

SEQ ID NO: 82509 - protein, 32 aa, Artificial Sequence; identical to SEQ ID NO: 47165
  GFR-binding peptide
  MOD_RES (2), (2): Xaa is C or S

SEQ ID NO: 82510 - protein, 40 aa, Artificial Sequence; identical to SEQ ID NO: 17594
  GFR-binding peptide
  MOD_RES (2), (36): Xaa is C or S
  MOD_RES (14), (15), (16), (17), (18): Xaa is A or G
  MOD_RES (19), (20), (21), (22): Xaa is A or G or is absent

SEQ ID NO: 82511 - protein, 39 aa, Artificial Sequence; identical to SEQ ID NO: 17595
  GFR-binding peptide
  MOD_RES (2), (4): Xaa is C or S

SEQ ID NO: 82512 - protein, 38 aa, Artificial Sequence; identical to SEQ ID NO: 18428
  GFR-binding peptide
  MOD_RES (1), (3), (37): Xaa is C or S
  MOD_RES (15), (16), (17), (18), (19): Xaa is A or G
  MOD_RES (20), (21), (22), (23): Xaa is A or G or is absent

SEQ ID NO: 82513 - protein, 37 aa, Artificial Sequence; identical to SEQ ID NO: 18430
  GFR-binding peptide
  MOD_RES (2), (2): Xaa is C or S
  MOD_RES (15), (16), (17), (18), (19): Xaa is A or G
  MOD_RES (20), (21), (22), (23): Xaa is A or G or is absent

SEQ ID NO: 82514 - protein, 35 aa, Artificial Sequence; identical to SEQ ID NO: 17596
  GFR-binding peptide
  MOD_RES (1), (1): Xaa is C or S

SEQ ID NO: 82515 - protein, 34 aa, Artificial Sequence; identical to SEQ ID NO: 50963
  GFR-binding peptide
  MOD_RES (33), (34): Xaa is C or S
  MOD_RES (11), (12), (13), (14), (15): Xaa is A or G
  MOD_RES (16), (17), (18), (19): Xaa is A or G or is absent

SEQ ID NO: 82516 - protein, 36 aa, Artificial Sequence; identical to SEQ ID NO: 18432
  GFR-binding peptide
  MOD_RES (34), (34): Xaa is C or S

SEQ ID NO: 82517 - protein, 39 aa, Artificial Sequence; identical to SEQ ID NO: 18433
  GFR-binding peptide
  MOD_RES (2), (36): Xaa is C or S

SEQ ID NO: 82518 - protein, 42 aa, Artificial Sequence; identical to SEQ ID NO: 17598
  GFR-binding peptide
  MOD_RES (2), (4), (38): Xaa is C or S

SEQ ID NO: 82519 - protein, 39 aa, Artificial Sequence; identical to SEQ ID NO: 17599
  GFR-binding peptide
  MOD_RES (1), (38): Xaa is C or S

SEQ ID NO: 82520 - protein, 35 aa, Artificial Sequence; identical to SEQ ID NO: 18435
  GFR-binding peptide
  MOD_RES (33), (33): Xaa is C or S
  MOD_RES (11), (12), (13), (14), (15): Xaa is A or G
  MOD_RES (16), (17), (18), (19): Xaa is A or G or is absent

SEQ ID NO: 82521 - protein, 37 aa, Artificial Sequence; identical to SEQ ID NO: 18436
  GFR-binding peptide
  MOD_RES (35), (35): Xaa is C or S

SEQ ID NO: 82522 - protein, 33 aa, Artificial Sequence; identical to SEQ ID NO: 49747
  GFR-binding peptide
  MOD_RES (1), (1): Xaa is C or S
  MOD_RES (12), (13), (14), (15), (16): Xaa is A or G
  MOD_RES (17), (18), (19), (20): Xaa is A or G or is absent

SEQ ID NO: 82523 - protein, 37 aa, Artificial Sequence; identical to SEQ ID NO: 47170
  GFR-binding peptide
  MOD_RES (1), (3), (34), (35): Xaa is C or S

SEQ ID NO: 82524 - protein, 40 aa, Artificial Sequence; identical to SEQ ID NO: 18439
  GFR-binding peptide
  MOD_RES (2), (4), (38): Xaa is C or S

SEQ ID NO: 82525 - protein, 43 aa, Artificial Sequence; identical to SEQ ID NO: 17605
  GFR-binding peptide
  MOD_RES (1), (3), (37): Xaa is C or S

SEQ ID NO: 82526 - protein, 33 aa, Artificial Sequence; identical to SEQ ID NO: 50980
  GFR-binding peptide
  MOD_RES (31), (32): Xaa is C or S

SEQ ID NO: 82527 - protein, 40 aa, Artificial Sequence; identical to SEQ ID NO: 18441
  GFR-binding peptide
  MOD_RES (1), (3), (40): Xaa is C or S
  MOD_RES (16), (17), (18), (19), (20): Xaa is A or G
  MOD_RES (21), (22), (23), (24): Xaa is A or G or is absent

SEQ ID NO: 82528 - protein, 40 aa, Artificial Sequence; identical to SEQ ID NO: 18442
  GFR-binding peptide
  MOD_RES (37), (37): Xaa is C or S
  MOD_RES (13), (14), (15), (16), (17): Xaa is A or G
  MOD_RES (18), (19), (20), (21): Xaa is A or G or is absent

SEQ ID NO: 82529 - protein, 38 aa, Artificial Sequence; identical to SEQ ID NO: 18443
  GFR-binding peptide
  MOD_RES (2), (36): Xaa is C or S
  MOD_RES (14), (15), (16), (17), (18): Xaa is A or G
  MOD_RES (19), (20), (21), (22): Xaa is A or G or is absent

SEQ ID NO: 82530 - protein, 38 aa, Artificial Sequence; identical to SEQ ID NO: 18444
  GFR-binding peptide
  MOD_RES (1), (38): Xaa is C or S
  MOD_RES (14), (15), (16), (17), (18): Xaa is A or G
  MOD_RES (19), (20), (21), (22): Xaa is A or G or is absent

SEQ ID NO: 82531 - protein, 36 aa, Artificial Sequence; identical to SEQ ID NO: 18445
  GFR-binding peptide
  MOD_RES (1), (35): Xaa is C or S

SEQ ID NO: 82532 - protein, 33 aa, Artificial Sequence; identical to SEQ ID NO: 50989
  GFR-binding peptide
  MOD_RES (2), (33): Xaa is C or S

SEQ ID NO: 82533 - protein, 35 aa, Artificial Sequence; identical to SEQ ID NO: 18446
  GFR-binding peptide
  MOD_RES (13), (14), (15), (16), (17): Xaa is A or G
  MOD_RES (18), (19), (20), (21): Xaa is A or G or is absent

SEQ ID NO: 82534 - protein, 37 aa, Artificial Sequence; identical to SEQ ID NO: 18447
  GFR-binding peptide
  MOD_RES (37), (37): Xaa is C or S
  MOD_RES (13), (14), (15), (16), (17): Xaa is A or G
  MOD_RES (18), (19), (20), (21): Xaa is A or G or is absent

SEQ ID NO: 82535 - protein, 40 aa, Artificial Sequence; identical to SEQ ID NO: 18448
  GFR-binding peptide
  MOD_RES (1), (3), (40): Xaa is C or S

SEQ ID NO: 82536 - protein, 37 aa, Artificial Sequence; identical to SEQ ID NO: 49761
  GFR-binding peptide
  MOD_RES (2), (4), (37): Xaa is C or S
  MOD_RES (15), (16), (17), (18), (19): Xaa is A or G
  MOD_RES (20), (21), (22), (23): Xaa is A or G or is absent

SEQ ID NO: 82537 - protein, 33 aa, Artificial Sequence; identical to SEQ ID NO: 48468
  GFR-binding peptide
  MOD_RES (2), (33): Xaa is C or S

SEQ ID NO: 82538 - protein, 40 aa, Artificial Sequence; identical to SEQ ID NO: 47183
  GFR-binding peptide
  MOD_RES (2), (4), (37), (38): Xaa is C or S
  MOD_RES (15), (16), (17), (18), (19): Xaa is A or G
  MOD_RES (20), (21), (22), (23): Xaa is A or G or is absent

SEQ ID NO: 82539 - protein, 37 aa, Artificial Sequence; identical to SEQ ID NO: 48470
  GFR-binding peptide
  MOD_RES (2), (35), (36): Xaa is C or S
  MOD_RES (13), (14), (15), (16), (17): Xaa is A or G
  MOD_RES (18), (19), (20), (21): Xaa is A or G or is absent

SEQ ID NO: 82540 - protein, 37 aa, Artificial Sequence; identical to SEQ ID NO: 17612
  GFR-binding peptide
  MOD_RES (2), (36): Xaa is C or S

SEQ ID NO: 82541 - protein, 37 aa, Artificial Sequence; identical to SEQ ID NO: 17613
  GFR-binding peptide
  MOD_RES (36), (36): Xaa is C or S
  MOD_RES (12), (13), (14), (15), (16): Xaa is A or G
  MOD_RES (17), (18), (19), (20): Xaa is A or G or is absent

SEQ ID NO: 82542 - protein, 36 aa, Artificial Sequence; identical to SEQ ID NO: 17614
  GFR-binding peptide
  MOD_RES (33), (33): Xaa is C or S
  MOD_RES (11), (12), (13), (14), (15): Xaa is A or G
  MOD_RES (16), (17), (18), (19): Xaa is A or G or is absent

SEQ ID NO: 82543 - protein, 39 aa, Artificial Sequence; identical to SEQ ID NO: 47190
  GFR-binding peptide
  MOD_RES (1), (34), (35): Xaa is C or S
  MOD_RES (12), (13), (14), (15), (16): Xaa is A or G
  MOD_RES (17), (18), (19), (20): Xaa is A or G or is absent

SEQ ID NO: 82544 - protein, 37 aa, Artificial Sequence; identical to SEQ ID NO: 18450
  GFR-binding peptide
  MOD_RES (34), (34): Xaa is C or S

SEQ ID NO: 82545 - protein, 39 aa, Artificial Sequence; identical to SEQ ID NO: 51000
  GFR-binding peptide
  MOD_RES (2), (4), (37), (38): Xaa is C or S
  MOD_RES (15), (16), (17), (18), (19): Xaa is A or G
  MOD_RES (20), (21), (22), (23): Xaa is A or G or is absent

SEQ ID NO: 82546 - protein, 40 aa, Artificial Sequence; identical to SEQ ID NO: 18451
  GFR-binding peptide
  MOD_RES (34), (34): Xaa is C or S

SEQ ID NO: 82547 - protein, 40 aa, Artificial Sequence; identical to SEQ ID NO: 17615
  GFR-binding peptide
  MOD_RES (36), (36): Xaa is C or S
  MOD_RES (12), (13), (14), (15), (16): Xaa is A or G
  MOD_RES (17), (18), (19), (20): Xaa is A or G or is absent

SEQ ID NO: 82548 - protein, 37 aa, Artificial Sequence; identical to SEQ ID NO: 18452
  GFR-binding peptide
  MOD_RES (1), (3), (37): Xaa is C or S

SEQ ID NO: 82549 - protein, 32 aa, Artificial Sequence; identical to SEQ ID NO: 47199
  GFR-binding peptide
  MOD_RES (1), (32): Xaa is C or S

SEQ ID NO: 82550 - protein, 34 aa, Artificial Sequence; identical to SEQ ID NO: 18454
  GFR-binding peptide
  MOD_RES (33), (33): Xaa is C or S

SEQ ID NO: 82551 - protein, 36 aa, Artificial Sequence; identical to SEQ ID NO: 51013
  GFR-binding peptide
  MOD_RES (31), (32): Xaa is C or S

SEQ ID NO: 82552 - protein, 40 aa, Artificial Sequence; identical to SEQ ID NO: 17617
  GFR-binding peptide
  MOD_RES (37), (37): Xaa is C or S
  MOD_RES (13), (14), (15), (16), (17): Xaa is A or G
  MOD_RES (18), (19), (20), (21): Xaa is A or G or is absent

SEQ ID NO: 82553 - protein, 31 aa, Artificial Sequence; identical to SEQ ID NO: 48483
  GFR-binding peptide
  MOD_RES (31), (31): Xaa is C or S

SEQ ID NO: 82554 - protein, 41 aa, Artificial Sequence; identical to SEQ ID NO: 17619
  GFR-binding peptide
  MOD_RES (1), (3), (40): Xaa is C or S

SEQ ID NO: 82555 - protein, 36 aa, Artificial Sequence; identical to SEQ ID NO: 48485
  GFR-binding peptide
  MOD_RES (2), (35), (36): Xaa is C or S
  MOD_RES (13), (14), (15), (16), (17): Xaa is A or G
  MOD_RES (18), (19), (20), (21): Xaa is A or G or is absent

SEQ ID NO: 82556 - protein, 32 aa, Artificial Sequence; identical to SEQ ID NO: 48487
  GFR-binding peptide
  MOD_RES (11), (12), (13), (14), (15): Xaa is A or G
  MOD_RES (16), (17), (18), (19): Xaa is A or G or is absent

SEQ ID NO: 82557 - protein, 38 aa, Artificial Sequence; identical to SEQ ID NO: 51015
  GFR-binding peptide
  MOD_RES (1), (3), (34), (35): Xaa is C or S

SEQ ID NO: 82558 - protein, 34 aa, Artificial Sequence; identical to SEQ ID NO: 18458
  GFR-binding peptide

SEQ ID NO: 82559 - protein, 38 aa, Artificial Sequence; identical to SEQ ID NO: 49772
  GFR-binding peptide
  MOD_RES (2), (4), (37), (38): Xaa is C or S
  MOD_RES (15), (16), (17), (18), (19): Xaa is A or G
  MOD_RES (20), (21), (22), (23): Xaa is A or G or is absent

SEQ ID NO: 82560 - protein, 41 aa, Artificial Sequence; identical to SEQ ID NO: 18459
  GFR-binding peptide
  MOD_RES (2), (4), (41): Xaa is C or S

SEQ ID NO: 82561 - protein, 38 aa, Artificial Sequence; identical to SEQ ID NO: 17623
  GFR-binding peptide
  MOD_RES (2), (4): Xaa is C or S

SEQ ID NO: 82562 - protein, 32 aa, Artificial Sequence; identical to SEQ ID NO: 49776
  GFR-binding peptide
  MOD_RES (2), (2): Xaa is C or S

SEQ ID NO: 82563 - protein, 38 aa, Artificial Sequence; identical to SEQ ID NO: 47207
  GFR-binding peptide
  MOD_RES (2), (35), (36): Xaa is C or S
  MOD_RES (13), (14), (15), (16), (17): Xaa is A or G
  MOD_RES (18), (19), (20), (21): Xaa is A or G or is absent

SEQ ID NO: 82564 - protein, 37 aa, Artificial Sequence; identical to SEQ ID NO: 18461
  GFR-binding peptide
  MOD_RES (1), (3), (37): Xaa is C or S
  MOD_RES (15), (16), (17), (18), (19): Xaa is A or G
  MOD_RES (20), (21), (22), (23): Xaa is A or G or is absent

SEQ ID NO: 82565 - protein, 38 aa, Artificial Sequence; identical to SEQ ID NO: 48495
  GFR-binding peptide
  MOD_RES (1), (34), (35): Xaa is C or S
  MOD_RES (12), (13), (14), (15), (16): Xaa is A or G
  MOD_RES (17), (18), (19), (20): Xaa is A or G or is absent

SEQ ID NO: 82566 - protein, 43 aa, Artificial Sequence; identical to SEQ ID NO: 17627
  GFR-binding peptide
  MOD_RES (2), (39): Xaa is C or S
  MOD_RES (15), (16), (17), (18), (19): Xaa is A or G
  MOD_RES (20), (21), (22), (23): Xaa is A or G or is absent

SEQ ID NO: 82567 - protein, 33 aa, Artificial Sequence; identical to SEQ ID NO: 51025
  GFR-binding peptide
  MOD_RES (2), (33): Xaa is C or S

SEQ ID NO: 82568 - protein, 37 aa, Artificial Sequence; identical to SEQ ID NO: 49784
  GFR-binding peptide
  MOD_RES (31), (32): Xaa is C or S

SEQ ID NO: 82569 - protein, 38 aa, Artificial Sequence; identical to SEQ ID NO: 17633
  GFR-binding peptide
  MOD_RES (2), (2): Xaa is C or S
  MOD_RES (15), (16), (17), (18), (19): Xaa is A or G
  MOD_RES (20), (21), (22), (23): Xaa is A or G or is absent

SEQ ID NO: 82570 - protein, 41 aa, Artificial Sequence; identical to SEQ ID NO: 17634
  GFR-binding peptide
  MOD_RES (1), (35): Xaa is C or S

SEQ ID NO: 82571 - protein, 38 aa, Artificial Sequence; identical to SEQ ID NO: 18469
  GFR-binding peptide
  MOD_RES (37), (37): Xaa is C or S

SEQ ID NO: 82572 - protein, 39 aa, Artificial Sequence; identical to SEQ ID NO: 47220
  GFR-binding peptide
  MOD_RES (1), (3), (34), (35): Xaa is C or S

SEQ ID NO: 82573 - protein, 41 aa, Artificial Sequence; identical to SEQ ID NO: 17635
  GFR-binding peptide
  MOD_RES (2), (4), (41): Xaa is C or S
  MOD_RES (17), (18), (19), (20), (21): Xaa is A or G
  MOD_RES (22), (23), (24), (25): Xaa is A or G or is absent

SEQ ID NO: 82574 - protein, 36 aa, Artificial Sequence; identical to SEQ ID NO: 49788
  GFR-binding peptide
  MOD_RES (31), (32): Xaa is C or S

SEQ ID NO: 82575 - protein, 37 aa, Artificial Sequence; identical to SEQ ID NO: 51030
  GFR-binding peptide
  MOD_RES (2), (4), (37): Xaa is C or S
  MOD_RES (15), (16), (17), (18), (19): Xaa is A or G
  MOD_RES (20), (21), (22), (23): Xaa is A or G or is absent

SEQ ID NO: 82576 - protein, 36 aa, Artificial Sequence; identical to SEQ ID NO: 17639
  GFR-binding peptide
  MOD_RES (34), (34): Xaa is C or S

SEQ ID NO: 82577 - protein, 33 aa, Artificial Sequence; identical to SEQ ID NO: 17640
  GFR-binding peptide
  MOD_RES (33), (33): Xaa is C or S

SEQ ID NO: 82578 - protein, 38 aa, Artificial Sequence; identical to SEQ ID NO: 48510
  GFR-binding peptide
  MOD_RES (2), (35), (36): Xaa is C or S
  MOD_RES (13), (14), (15), (16), (17): Xaa is A or G
  MOD_RES (18), (19), (20), (21): Xaa is A or G or is absent

SEQ ID NO: 82579 - protein, 34 aa, Artificial Sequence; identical to SEQ ID NO: 49793
  GFR-binding peptide
  MOD_RES (1), (32), (33): Xaa is C or S

SEQ ID NO: 82580 - protein, 38 aa, Artificial Sequence; identical to SEQ ID NO: 51035
  GFR-binding peptide
  MOD_RES (1), (3), (36), (37): Xaa is C or S
  MOD_RES (14), (15), (16), (17), (18): Xaa is A or G
  MOD_RES (19), (20), (21), (22): Xaa is A or G or is absent

SEQ ID NO: 82581 - protein, 34 aa, Artificial Sequence; identical to SEQ ID NO: 49794
  GFR-binding peptide
  MOD_RES (1), (3), (34): Xaa is C or S

SEQ ID NO: 82582 - protein, 45 aa, Artificial Sequence; identical to SEQ ID NO: 17644
  GFR-binding peptide
  MOD_RES (2), (4), (41): Xaa is C or S
  MOD_RES (17), (18), (19), (20), (21): Xaa is A or G
  MOD_RES (22), (23), (24), (25): Xaa is A or G or is absent

SEQ ID NO: 82583 - protein, 33 aa, Artificial Sequence; identical to SEQ ID NO: 18473
  GFR-binding peptide
  MOD_RES (12), (13), (14), (15), (16): Xaa is A or G
  MOD_RES (17), (18), (19), (20): Xaa is A or G or is absent

SEQ ID NO: 82584 - protein, 33 aa, Artificial Sequence; identical to SEQ ID NO: 17650
  GFR-binding peptide
  MOD_RES (33), (33): Xaa is C or S

SEQ ID NO: 82585 - protein, 41 aa, Artificial Sequence; identical to SEQ ID NO: 17652
  GFR-binding peptide
  MOD_RES (1), (35): Xaa is C or S
  MOD_RES (13), (14), (15), (16), (17): Xaa is A or G
  MOD_RES (18), (19), (20), (21): Xaa is A or G or is absent

SEQ ID NO: 82586 - protein, 37 aa, Artificial Sequence; identical to SEQ ID NO: 18476
  GFR-binding peptide
  MOD_RES (1), (3): Xaa is C or S
  MOD_RES (16), (17), (18), (19), (20): Xaa is A or G
  MOD_RES (21), (22), (23), (24): Xaa is A or G or is absent

SEQ ID NO: 82587 - protein, 43 aa, Artificial Sequence; identical to SEQ ID NO: 17654
  GFR-binding peptide
  MOD_RES (2), (4), (41): Xaa is C or S
  MOD_RES (17), (18), (19), (20), (21): Xaa is A or G
  MOD_RES (22), (23), (24), (25): Xaa is A or G or is absent

SEQ ID NO: 82588 - protein, 39 aa, Artificial Sequence; identical to SEQ ID NO: 47234
  GFR-binding peptide
  MOD_RES (33), (34): Xaa is C or S
  MOD_RES (11), (12), (13), (14), (15): Xaa is A or G
  MOD_RES (16), (17), (18), (19): Xaa is A or G or is absent

SEQ ID NO: 82589 - protein, 42 aa, Artificial Sequence; identical to SEQ ID NO: 17655
  GFR-binding peptide
  MOD_RES (2), (4), (38): Xaa is C or S
  MOD_RES (16), (17), (18), (19), (20): Xaa is A or G
  MOD_RES (21), (22), (23), (24): Xaa is A or G or is absent

SEQ ID NO: 82590 - protein, 42 aa, Artificial Sequence; identical to SEQ ID NO: 18479
  GFR-binding peptide
  MOD_RES (1), (38): Xaa is C or S
  MOD_RES (14), (15), (16), (17), (18): Xaa is A or G
  MOD_RES (19), (20), (21), (22): Xaa is A or G or is absent

SEQ ID NO: 82591 - protein, 38 aa, Artificial Sequence; identical to SEQ ID NO: 47238
  GFR-binding peptide
  MOD_RES (33), (34): Xaa is C or S
  MOD_RES (11), (12), (13), (14), (15): Xaa is A or G
  MOD_RES (16), (17), (18), (19): Xaa is A or G or is absent

SEQ ID NO: 82592 - protein, 38 aa, Artificial Sequence; identical to SEQ ID NO: 49806
  GFR-binding peptide
  MOD_RES (2), (33), (34): Xaa is C or S

SEQ ID NO: 82593 - protein, 35 aa, Artificial Sequence; identical to SEQ ID NO: 17658
  GFR-binding peptide
  MOD_RES (2), (2): Xaa is C or S

SEQ ID NO: 82594 - protein, 39 aa, Artificial Sequence; identical to SEQ ID NO: 18480
  GFR-binding peptide
  MOD_RES (2), (39): Xaa is C or S

SEQ ID NO: 82595 - protein, 36 aa, Artificial Sequence; identical to SEQ ID NO: 17659
  GFR-binding peptide
  MOD_RES (2), (2): Xaa is C or S
  MOD_RES (15), (16), (17), (18), (19): Xaa is A or G
  MOD_RES (20), (21), (22), (23): Xaa is A or G or is absent

SEQ ID NO: 82596 - protein, 38 aa, Artificial Sequence; identical to SEQ ID NO: 47241
  GFR-binding peptide
  MOD_RES (2), (4), (35), (36): Xaa is C or S

SEQ ID NO: 82597 - protein, 38 aa, Artificial Sequence; identical to SEQ ID NO: 49811
  GFR-binding peptide
  MOD_RES (2), (33), (34): Xaa is C or S

SEQ ID NO: 82598 - protein, 42 aa, Artificial Sequence; identical to SEQ ID NO: 17661
  GFR-binding peptide
  MOD_RES (2), (4), (38): Xaa is C or S
  MOD_RES (16), (17), (18), (19), (20): Xaa is A or G
  MOD_RES (21), (22), (23), (24): Xaa is A or G or is absent

SEQ ID NO: 82599 - protein, 32 aa, Artificial Sequence; identical to SEQ ID NO: 17663
  GFR-binding peptide

SEQ ID NO: 82600 - protein, 38 aa, Artificial Sequence; identical to SEQ ID NO: 17664
  GFR-binding peptide
  MOD_RES (1), (35): Xaa is C or S
  MOD_RES (13), (14), (15), (16), (17): Xaa is A or G
  MOD_RES (18), (19), (20), (21): Xaa is A or G or is absent

SEQ ID NO: 82601 - protein, 43 aa, Artificial Sequence; identical to SEQ ID NO: 18487
  GFR-binding peptide
  MOD_RES (1), (3), (37): Xaa is C or S

SEQ ID NO: 82602 - protein, 40 aa, Artificial Sequence; identical to SEQ ID NO: 18489
  GFR-binding peptide
  MOD_RES (1), (35): Xaa is C or S
  MOD_RES (13), (14), (15), (16), (17): Xaa is A or G
  MOD_RES (18), (19), (20), (21): Xaa is A or G or is absent

SEQ ID NO: 82603 - protein, 37 aa, Artificial Sequence; identical to SEQ ID NO: 18490
  GFR-binding peptide
  MOD_RES (2), (2): Xaa is C or S

SEQ ID NO: 82604 - protein, 41 aa, Artificial Sequence; identical to SEQ ID NO: 17666
  GFR-binding peptide
  MOD_RES (2), (4), (41): Xaa is C or S

SEQ ID NO: 82605 - protein, 42 aa, Artificial Sequence; identical to SEQ ID NO: 17667
  GFR-binding peptide
  MOD_RES (1), (3), (37): Xaa is C or S

SEQ ID NO: 82606 - protein, 38 aa, Artificial Sequence; identical to SEQ ID NO: 18491
  GFR-binding peptide
  MOD_RES (35), (35): Xaa is C or S
  MOD_RES (11), (12), (13), (14), (15): Xaa is A or G
  MOD_RES (16), (17), (18), (19): Xaa is A or G or is absent

SEQ ID NO: 82607 - protein, 37 aa, Artificial Sequence; identical to SEQ ID NO: 18492
  GFR-binding peptide
  MOD_RES (34), (34): Xaa is C or S
  MOD_RES (12), (13), (14), (15), (16): Xaa is A or G
  MOD_RES (17), (18), (19), (20): Xaa is A or G or is absent

SEQ ID NO: 82608 - protein, 36 aa, Artificial Sequence; identical to SEQ ID NO: 51059
  GFR-binding peptide
  MOD_RES (33), (34): Xaa is C or S
  MOD_RES (11), (12), (13), (14), (15): Xaa is A or G
  MOD_RES (16), (17), (18), (19): Xaa is A or G or is absent

SEQ ID NO: 82609 - protein, 43 aa, Artificial Sequence; identical to SEQ ID NO: 18493
  GFR-binding peptide
  MOD_RES (2), (39): Xaa is C or S
  MOD_RES (15), (16), (17), (18), (19): Xaa is A or G
  MOD_RES (20), (21), (22), (23): Xaa is A or G or is absent

SEQ ID NO: 82610 - protein, 37 aa, Artificial Sequence; identical to SEQ ID NO: 18494
  GFR-binding peptide
  MOD_RES (1), (3): Xaa is C or S
  MOD_RES (16), (17), (18), (19), (20): Xaa is A or G
  MOD_RES (21), (22), (23), (24): Xaa is A or G or is absent

SEQ ID NO: 82611 - protein, 32 aa, Artificial Sequence; identical to SEQ ID NO: 17668
  GFR-binding peptide
  MOD_RES (11), (12), (13), (14), (15): Xaa is A or G
  MOD_RES (16), (17), (18), (19): Xaa is A or G or is absent

SEQ ID NO: 82612 - protein, 33 aa, Artificial Sequence; identical to SEQ ID NO: 17669
  GFR-binding peptide

SEQ ID NO: 82613 - protein, 42 aa, Artificial Sequence; identical to SEQ ID NO: 17670
  GFR-binding peptide
  MOD_RES (2), (4), (41): Xaa is C or S

SEQ ID NO: 82614 - protein, 37 aa, Artificial Sequence; identical to SEQ ID NO: 18495
  GFR-binding peptide
  MOD_RES (1), (3): Xaa is C or S
  MOD_RES (16), (17), (18), (19), (20): Xaa is A or G
  MOD_RES (21), (22), (23), (24): Xaa is A or G or is absent

SEQ ID NO: 82615 - protein, 38 aa, Artificial Sequence; identical to SEQ ID NO: 47264
  GFR-binding peptide
  MOD_RES (33), (34): Xaa is C or S
  MOD_RES (11), (12), (13), (14), (15): Xaa is A or G
  MOD_RES (16), (17), (18), (19): Xaa is A or G or is absent

SEQ ID NO: 82616 - protein, 35 aa, Artificial Sequence; identical to SEQ ID NO: 47267
  GFR-binding peptide
  MOD_RES (31), (32): Xaa is C or S

SEQ ID NO: 82617 - protein, 39 aa, Artificial Sequence; identical to SEQ ID NO: 17673
  GFR-binding peptide
  MOD_RES (34), (34): Xaa is C or S

SEQ ID NO: 82618 - protein, 39 aa, Artificial Sequence; identical to SEQ ID NO: 17674
  GFR-binding peptide
  MOD_RES (37), (37): Xaa is C or S
  MOD_RES (13), (14), (15), (16), (17): Xaa is A or G
  MOD_RES (18), (19), (20), (21): Xaa is A or G or is absent

SEQ ID NO: 82619 - protein, 36 aa, Artificial Sequence; identical to SEQ ID NO: 49830
  GFR-binding peptide
  MOD_RES (31), (32): Xaa is C or S

SEQ ID NO: 82620 - protein, 36 aa, Artificial Sequence; identical to SEQ ID NO: 47274
  GFR-binding peptide
  MOD_RES (1), (34), (35): Xaa is C or S
  MOD_RES (12), (13), (14), (15), (16): Xaa is A or G
  MOD_RES (17), (18), (19), (20): Xaa is A or G or is absent

SEQ ID NO: 82621 - protein, 38 aa, Artificial Sequence; identical to SEQ ID NO: 47276
  GFR-binding peptide
  MOD_RES (1), (32), (33): Xaa is C or S

SEQ ID NO: 82622 - protein, 36 aa, Artificial Sequence; identical to SEQ ID NO: 17678
  GFR-binding peptide

SEQ ID NO: 82623 - protein, 37 aa, Artificial Sequence; identical to SEQ ID NO: 49832
  GFR-binding peptide
  MOD_RES (1), (32), (33): Xaa is C or S

SEQ ID NO: 82624 - protein, 40 aa, Artificial Sequence; identical to SEQ ID NO: 17680
  GFR-binding peptide
  MOD_RES (2), (39): Xaa is C or S
  MOD_RES (15), (16), (17), (18), (19): Xaa is A or G
  MOD_RES (20), (21), (22), (23): Xaa is A or G or is absent

SEQ ID NO: 82625 - protein, 37 aa, Artificial Sequence; identical to SEQ ID NO: 17681
  GFR-binding peptide
  MOD_RES (2), (4): Xaa is C or S
  MOD_RES (16), (17), (18), (19), (20): Xaa is A or G
  MOD_RES (21), (22), (23), (24): Xaa is A or G or is absent

SEQ ID NO: 82626 - protein, 34 aa, Artificial Sequence; identical to SEQ ID NO: 47284
  GFR-binding peptide
  MOD_RES (2), (4): Xaa is C or S

SEQ ID NO: 82627 - protein, 38 aa, Artificial Sequence; identical to SEQ ID NO: 18500
  GFR-binding peptide
  MOD_RES (36), (36): Xaa is C or S

SEQ ID NO: 82628 - protein, 34 aa, Artificial Sequence; identical to SEQ ID NO: 17688
  GFR-binding peptide
  MOD_RES (34), (34): Xaa is C or S

SEQ ID NO: 82629 - protein, 34 aa, Artificial Sequence; identical to SEQ ID NO: 47290
  GFR-binding peptide
  MOD_RES (1), (34): Xaa is C or S
  MOD_RES (12), (13), (14), (15), (16): Xaa is A or G
  MOD_RES (17), (18), (19), (20): Xaa is A or G or is absent

SEQ ID NO: 82630 - protein, 35 aa, Artificial Sequence; identical to SEQ ID NO: 18504
  GFR-binding peptide
  MOD_RES (13), (14), (15), (16), (17): Xaa is A or G
  MOD_RES (18), (19), (20), (21): Xaa is A or G or is absent

SEQ ID NO: 82631 - protein, 39 aa, Artificial Sequence; identical to SEQ ID NO: 17689
  GFR-binding peptide
  MOD_RES (2), (4): Xaa is C or S

SEQ ID NO: 82632 - protein, 40 aa, Artificial Sequence; identical to SEQ ID NO: 18507
  GFR-binding peptide
  MOD_RES (2), (4): Xaa is C or S

SEQ ID NO: 82633 - protein, 34 aa, Artificial Sequence; identical to SEQ ID NO: 18508
  GFR-binding peptide
  MOD_RES (12), (13), (14), (15), (16): Xaa is A or G
  MOD_RES (17), (18), (19), (20): Xaa is A or G or is absent

SEQ ID NO: 82634 - protein, 36 aa, Artificial Sequence; identical to SEQ ID NO: 47300
  GFR-binding peptide
  MOD_RES (1), (3), (36): Xaa is C or S
  MOD_RES (14), (15), (16), (17), (18): Xaa is A or G
  MOD_RES (19), (20), (21), (22): Xaa is A or G or is absent

SEQ ID NO: 82635 - protein, 35 aa, Artificial Sequence; identical to SEQ ID NO: 18509
  GFR-binding peptide
  MOD_RES (12), (13), (14), (15), (16): Xaa is A or G
  MOD_RES (17), (18), (19), (20): Xaa is A or G or is absent

SEQ ID NO: 82636 - protein, 38 aa, Artificial Sequence; identical to SEQ ID NO: 17691
  GFR-binding peptide
  MOD_RES (2), (4): Xaa is C or S

SEQ ID NO: 82637 - protein, 39 aa, Artificial Sequence; identical to SEQ ID NO: 18511
  GFR-binding peptide
  MOD_RES (2), (4): Xaa is C or S
  MOD_RES (17), (18), (19), (20), (21): Xaa is A or G
  MOD_RES (22), (23), (24), (25): Xaa is A or G or is absent

SEQ ID NO: 82638 - protein, 40 aa, Artificial Sequence; identical to SEQ ID NO: 47302
  GFR-binding peptide
  MOD_RES (1), (3), (34), (35): Xaa is C or S

SEQ ID NO: 82639 - protein, 40 aa, Artificial Sequence; identical to SEQ ID NO: 48572
  GFR-binding peptide
  MOD_RES (2), (35), (36): Xaa is C or S
  MOD_RES (13), (14), (15), (16), (17): Xaa is A or G
  MOD_RES (18), (19), (20), (21): Xaa is A or G or is absent

SEQ ID NO: 82640 - protein, 34 aa, Artificial Sequence; identical to SEQ ID NO: 17692
  GFR-binding peptide
  MOD_RES (12), (13), (14), (15), (16): Xaa is A or G
  MOD_RES (17), (18), (19), (20): Xaa is A or G or is absent

SEQ ID NO: 82641 - protein, 34 aa, Artificial Sequence; identical to SEQ ID NO: 18514
  GFR-binding peptide
  MOD_RES (33), (33): Xaa is C or S
  MOD_RES (11), (12), (13), (14), (15): Xaa is A or G
  MOD_RES (16), (17), (18), (19): Xaa is A or G or is absent

SEQ ID NO: 82642 - protein, 33 aa, Artificial Sequence; identical to SEQ ID NO: 18515
  GFR-binding peptide

SEQ ID NO: 82643 - protein, 42 aa, Artificial Sequence; identical to SEQ ID NO: 18516
  GFR-binding peptide
  MOD_RES (1), (3), (37): Xaa is C or S
  MOD_RES (15), (16), (17), (18), (19): Xaa is A or G
  MOD_RES (20), (21), (22), (23): Xaa is A or G or is absent

SEQ ID NO: 82644 - protein, 41 aa, Artificial Sequence; identical to SEQ ID NO: 51102
  GFR-binding peptide
  MOD_RES (2), (35), (36): Xaa is C or S
  MOD_RES (13), (14), (15), (16), (17): Xaa is A or G
  MOD_RES (18), (19), (20), (21): Xaa is A or G or is absent

SEQ ID NO: 82645 - protein, 38 aa, Artificial Sequence; identical to SEQ ID NO: 18519
  GFR-binding peptide
  MOD_RES (1), (3): Xaa is C or S
  MOD_RES (16), (17), (18), (19), (20): Xaa is A or G
  MOD_RES (21), (22), (23), (24): Xaa is A or G or is absent

SEQ ID NO: 82646 - protein, 33 aa, Artificial Sequence; identical to SEQ ID NO: 17695
  GFR-binding peptide
  MOD_RES (33), (33): Xaa is C or S

SEQ ID NO: 82647 - protein, 37 aa, Artificial Sequence; identical to SEQ ID NO: 49864
  GFR-binding peptide
  MOD_RES (2), (33), (34): Xaa is C or S

SEQ ID NO: 82648 - protein, 35 aa, Artificial Sequence; identical to SEQ ID NO: 18521
  GFR-binding peptide
  MOD_RES (1), (1): Xaa is C or S

SEQ ID NO: 82649 - protein, 38 aa, Artificial Sequence; identical to SEQ ID NO: 18522
  GFR-binding peptide
  MOD_RES (34), (34): Xaa is C or S

SEQ ID NO: 82650 - protein, 36 aa, Artificial Sequence; identical to SEQ ID NO: 18523
  GFR-binding peptide
  MOD_RES (1), (1): Xaa is C or S

SEQ ID NO: 82651 - protein, 36 aa, Artificial Sequence; identical to SEQ ID NO: 49867
  GFR-binding peptide
  MOD_RES (2), (4): Xaa is C or S
  MOD_RES (15), (16), (17), (18), (19): Xaa is A or G
  MOD_RES (20), (21), (22), (23): Xaa is A or G or is absent

SEQ ID NO: 82652 - protein, 41 aa, Artificial Sequence; identical to SEQ ID NO: 17697
  GFR-binding peptide
  MOD_RES (2), (4), (38): Xaa is C or S

SEQ ID NO: 82653 - protein, 42 aa, Artificial Sequence; identical to SEQ ID NO: 48601
  GFR-binding peptide
  MOD_RES (1), (3), (36), (37): Xaa is C or S
  MOD_RES (14), (15), (16), (17), (18): Xaa is A or G
  MOD_RES (19), (20), (21), (22): Xaa is A or G or is absent

SEQ ID NO: 82654 - protein, 41 aa, Artificial Sequence; identical to SEQ ID NO: 17700
  GFR-binding peptide
  MOD_RES (1), (35): Xaa is C or S

SEQ ID NO: 82655 - protein, 37 aa, Artificial Sequence; identical to SEQ ID NO: 18528
  GFR-binding peptide
  MOD_RES (1), (35): Xaa is C or S

SEQ ID NO: 82656 - protein, 33 aa, Artificial Sequence; identical to SEQ ID NO: 48603
  GFR-binding peptide
  MOD_RES (1), (32), (33): Xaa is C or S

SEQ ID NO: 82657 - protein, 41 aa, Artificial Sequence; identical to SEQ ID NO: 17701
  GFR-binding peptide
  MOD_RES (1), (35): Xaa is C or S
  MOD_RES (13), (14), (15), (16), (17): Xaa is A or G
  MOD_RES (18), (19), (20), (21): Xaa is A or G or is absent

SEQ ID NO: 82658 - protein, 37 aa, Artificial Sequence; identical to SEQ ID NO: 18530
  GFR-binding peptide
  MOD_RES (1), (35): Xaa is C or S
  MOD_RES (13), (14), (15), (16), (17): Xaa is A or G
  MOD_RES (18), (19), (20), (21): Xaa is A or G or is absent

SEQ ID NO: 82659 - protein, 35 aa, Artificial Sequence; identical to SEQ ID NO: 18531
  GFR-binding peptide
  MOD_RES (35), (35): Xaa is C or S

SEQ ID NO: 82660 - protein, 35 aa, Artificial Sequence; identical to SEQ ID NO: 48605
  GFR-binding peptide
  MOD_RES (1), (32), (33): Xaa is C or S

SEQ ID NO: 82661 - protein, 40 aa, Artificial Sequence; identical to SEQ ID NO: 17704
  GFR-binding peptide
  MOD_RES (2), (4): Xaa is C or S
  MOD_RES (17), (18), (19), (20), (21): Xaa is A or G
  MOD_RES (22), (23), (24), (25): Xaa is A or G or is absent

SEQ ID NO: 82662 - protein, 34 aa, Artificial Sequence; identical to SEQ ID NO: 17705
  GFR-binding peptide
  MOD_RES (1), (1): Xaa is C or S
  MOD_RES (13), (14), (15), (16), (17): Xaa is A or G
  MOD_RES (18), (19), (20), (21): Xaa is A or G or is absent

SEQ ID NO: 82663 - protein, 38 aa, Artificial Sequence; identical to SEQ ID NO: 18532
  GFR-binding peptide
  MOD_RES (37), (37): Xaa is C or S

SEQ ID NO: 82664 - protein, 40 aa, Artificial Sequence; identical to SEQ ID NO: 49878
  GFR-binding peptide
  MOD_RES (2), (35), (36): Xaa is C or S
  MOD_RES (13), (14), (15), (16), (17): Xaa is A or G
  MOD_RES (18), (19), (20), (21): Xaa is A or G or is absent

SEQ ID NO: 82665 - protein, 37 aa, Artificial Sequence; identical to SEQ ID NO: 17706
  GFR-binding peptide
  MOD_RES (36), (36): Xaa is C or S
  MOD_RES (12), (13), (14), (15), (16): Xaa is A or G
  MOD_RES (17), (18), (19), (20): Xaa is A or G or is absent

SEQ ID NO: 82666 - protein, 32 aa, Artificial Sequence; identical to SEQ ID NO: 48609
  GFR-binding peptide
  MOD_RES (2), (2): Xaa is C or S

SEQ ID NO: 82667 - protein, 38 aa, Artificial Sequence; identical to SEQ ID NO: 48611
  GFR-binding peptide
  MOD_RES (2), (4), (35), (36): Xaa is C or S

SEQ ID NO: 82668 - protein, 33 aa, Artificial Sequence; identical to SEQ ID NO: 48613
  GFR-binding peptide
  MOD_RES (31), (32): Xaa is C or S

SEQ ID NO: 82669 - protein, 38 aa, Artificial Sequence; identical to SEQ ID NO: 47346
  GFR-binding peptide
  MOD_RES (2), (33), (34): Xaa is C or S

SEQ ID NO: 82670 - protein, 40 aa, Artificial Sequence; identical to SEQ ID NO: 17707
  GFR-binding peptide
  MOD_RES (1), (3), (37): Xaa is C or S

SEQ ID NO: 82671 - protein, 36 aa, Artificial Sequence; identical to SEQ ID NO: 18534
  GFR-binding peptide
  MOD_RES (1), (3): Xaa is C or S
  MOD_RES (15), (16), (17), (18), (19): Xaa is A or G
  MOD_RES (20), (21), (22), (23): Xaa is A or G or is absent

SEQ ID NO: 82672 - protein, 35 aa, Artificial Sequence; identical to SEQ ID NO: 47349
  GFR-binding peptide
  MOD_RES (33), (34): Xaa is C or S
  MOD_RES (11), (12), (13), (14), (15): Xaa is A or G
  MOD_RES (16), (17), (18), (19): Xaa is A or G or is absent

SEQ ID NO: 82673 - protein, 36 aa, Artificial Sequence; identical to SEQ ID NO: 18535
  GFR-binding peptide
  MOD_RES (36), (36): Xaa is C or S
  MOD_RES (12), (13), (14), (15), (16): Xaa is A or G
  MOD_RES (17), (18), (19), (20): Xaa is A or G or is absent

SEQ ID NO: 82674 - protein, 40 aa, Artificial Sequence; identical to SEQ ID NO: 18536
  GFR-binding peptide
  MOD_RES (1), (35): Xaa is C or S

SEQ ID NO: 82675 - protein, 38 aa, Artificial Sequence; identical to SEQ ID NO: 17709
  GFR-binding peptide
  MOD_RES (2), (2): Xaa is C or S

SEQ ID NO: 82676 - protein, 42 aa, Artificial Sequence; identical to SEQ ID NO: 17710
  GFR-binding peptide
  MOD_RES (2), (39): Xaa is C or S
  MOD_RES (15), (16), (17), (18), (19): Xaa is A or G
  MOD_RES (20), (21), (22), (23): Xaa is A or G or is absent

SEQ ID NO: 82677 - protein, 37 aa, Artificial Sequence; identical to SEQ ID NO: 18538
  GFR-binding peptide
  MOD_RES (1), (3), (37): Xaa is C or S
  MOD_RES (15), (16), (17), (18), (19): Xaa is A or G
  MOD_RES (20), (21), (22), (23): Xaa is A or G or is absent

SEQ ID NO: 82678 - protein, 40 aa, Artificial Sequence; identical to SEQ ID NO: 18539
  GFR-binding peptide
  MOD_RES (1), (35): Xaa is C or S

SEQ ID NO: 82679 - protein, 37 aa, Artificial Sequence; identical to SEQ ID NO: 18540
  GFR-binding peptide
  MOD_RES (35), (35): Xaa is C or S

SEQ ID NO: 82680 - protein, 36 aa, Artificial Sequence; identical to SEQ ID NO: 18541
  GFR-binding peptide
  MOD_RES (35), (35): Xaa is C or S
  MOD_RES (11), (12), (13), (14), (15): Xaa is A or G
  MOD_RES (16), (17), (18), (19): Xaa is A or G or is absent

SEQ ID NO: 82681 - protein, 40 aa, Artificial Sequence; identical to SEQ ID NO: 18543
  GFR-binding peptide
  MOD_RES (1), (38): Xaa is C or S
  MOD_RES (14), (15), (16), (17), (18): Xaa is A or G
  MOD_RES (19), (20), (21), (22): Xaa is A or G or is absent

SEQ ID NO: 82682 - protein, 34 aa, Artificial Sequence; identical to SEQ ID NO: 18545
  GFR-binding peptide
  MOD_RES (11), (12), (13), (14), (15): Xaa is A or G
  MOD_RES (16), (17), (18), (19): Xaa is A or G or is absent

SEQ ID NO: 82683 - protein, 39 aa, Artificial Sequence; identical to SEQ ID NO: 51140
  GFR-binding peptide
  MOD_RES (2), (33), (34): Xaa is C or S

SEQ ID NO: 82684 - protein, 32 aa, Artificial Sequence; identical to SEQ ID NO: 17712
  GFR-binding peptide
  MOD_RES (11), (12), (13), (14), (15): Xaa is A or G
  MOD_RES (16), (17), (18), (19): Xaa is A or G or is absent

SEQ ID NO: 82685 - protein, 35 aa, Artificial Sequence; identical to SEQ ID NO: 49893
  GFR-binding peptide
  MOD_RES (31), (32): Xaa is C or S

SEQ ID NO: 82686 - protein, 32 aa, Artificial Sequence; identical to SEQ ID NO: 17713
  GFR-binding peptide
  MOD_RES (11), (12), (13), (14), (15): Xaa is A or G
  MOD_RES (16), (17), (18), (19): Xaa is A or G or is absent

SEQ ID NO: 82687 - protein, 40 aa, Artificial Sequence; identical to SEQ ID NO: 48632
  GFR-binding peptide
  MOD_RES (1), (3), (36), (37): Xaa is C or S
  MOD_RES (14), (15), (16), (17), (18): Xaa is A or G
  MOD_RES (19), (20), (21), (22): Xaa is A or G or is absent

SEQ ID NO: 82688 - protein, 38 aa, Artificial Sequence; identical to SEQ ID NO: 49897
  GFR-binding peptide
  MOD_RES (33), (34): Xaa is C or S
  MOD_RES (11), (12), (13), (14), (15): Xaa is A or G
  MOD_RES (16), (17), (18), (19): Xaa is A or G or is absent

SEQ ID NO: 82689 - protein, 40 aa, Artificial Sequence; identical to SEQ ID NO: 18547
  GFR-binding peptide
  MOD_RES (2), (4): Xaa is C or S

SEQ ID NO: 82690 - protein, 41 aa, Artificial Sequence; identical to SEQ ID NO: 49900
  GFR-binding peptide
  MOD_RES (2), (4), (35), (36): Xaa is C or S

SEQ ID NO: 82691 - protein, 41 aa, Artificial Sequence; identical to SEQ ID NO: 17717
  GFR-binding peptide
  MOD_RES (1), (3), (37): Xaa is C or S

SEQ ID NO: 82692 - protein, 36 aa, Artificial Sequence; identical to SEQ ID NO: 18548
  GFR-binding peptide
  MOD_RES (2), (2): Xaa is C or S

SEQ ID NO: 82693 - protein, 33 aa, Artificial Sequence; identical to SEQ ID NO: 18551
  GFR-binding peptide

SEQ ID NO: 82694 - protein, 34 aa, Artificial Sequence; identical to SEQ ID NO: 18552
  GFR-binding peptide

SEQ ID NO: 82695 - protein, 38 aa, Artificial Sequence; identical to SEQ ID NO: 51150
  GFR-binding peptide
  MOD_RES (1), (34), (35): Xaa is C or S
  MOD_RES (12), (13), (14), (15), (16): Xaa is A or G
  MOD_RES (17), (18), (19), (20): Xaa is A or G or is absent

SEQ ID NO: 82696 - protein, 36 aa, Artificial Sequence; identical to SEQ ID NO: 17718
  GFR-binding peptide
  MOD_RES (34), (34): Xaa is C or S
  MOD_RES (12), (13), (14), (15), (16): Xaa is A or G
  MOD_RES (17), (18), (19), (20): Xaa is A or G or is absent

SEQ ID NO: 82697 - protein, 35 aa, Artificial Sequence; identical to SEQ ID NO: 47368
  GFR-binding peptide
  MOD_RES (2), (4), (35): Xaa is C or S

SEQ ID NO: 82698 - protein, 36 aa, Artificial Sequence; identical to SEQ ID NO: 51151
  GFR-binding peptide
  MOD_RES (2), (4), (35), (36): Xaa is C or S

SEQ ID NO: 82699 - protein, 34 aa, Artificial Sequence; identical to SEQ ID NO: 17721
  GFR-binding peptide
  MOD_RES (11), (12), (13), (14), (15): Xaa is A or G
  MOD_RES (16), (17), (18), (19): Xaa is A or G or is absent

SEQ ID NO: 82700 - protein, 36 aa, Artificial Sequence; identical to SEQ ID NO: 18556
  GFR-binding peptide
  MOD_RES (1), (1): Xaa is C or S
  MOD_RES (14), (15), (16), (17), (18): Xaa is A or G
  MOD_RES (19), (20), (21), (22): Xaa is A or G or is absent

SEQ ID NO: 82701 - protein, 39 aa, Artificial Sequence; identical to SEQ ID NO: 18557
  GFR-binding peptide
  MOD_RES (2), (36): Xaa is C or S
  MOD_RES (14), (15), (16), (17), (18): Xaa is A or G
  MOD_RES (19), (20), (21), (22): Xaa is A or G or is absent

SEQ ID NO: 82702 - protein, 41 aa, Artificial Sequence; identical to SEQ ID NO: 17723
  GFR-binding peptide
  MOD_RES (1), (38): Xaa is C or S
  MOD_RES (14), (15), (16), (17), (18): Xaa is A or G
  MOD_RES (19), (20), (21), (22): Xaa is A or G or is absent

SEQ ID NO: 82703 - protein, 40 aa, Artificial Sequence; identical to SEQ ID NO: 51158
  GFR-binding peptide
  MOD_RES (2), (35), (36): Xaa is C or S
  MOD_RES (13), (14), (15), (16), (17): Xaa is A or G
  MOD_RES (18), (19), (20), (21): Xaa is A or G or is absent

SEQ ID NO: 82704 - protein, 36 aa, Artificial Sequence; identical to SEQ ID NO: 18558
  GFR-binding peptide
  MOD_RES (36), (36): Xaa is C or S

SEQ ID NO: 82705 - protein, 38 aa, Artificial Sequence; identical to SEQ ID NO: 17725
  GFR-binding peptide
  MOD_RES (35), (35): Xaa is C or S

SEQ ID NO: 82706 - protein, 39 aa, Artificial Sequence; identical to SEQ ID NO: 49912
  GFR-binding peptide
  MOD_RES (2), (33), (34): Xaa is C or S

SEQ ID NO: 82707 - protein, 35 aa, Artificial Sequence; identical to SEQ ID NO: 17726
  GFR-binding peptide
  MOD_RES (34), (34): Xaa is C or S
  MOD_RES (12), (13), (14), (15), (16): Xaa is A or G
  MOD_RES (17), (18), (19), (20): Xaa is A or G or is absent

SEQ ID NO: 82708 - protein, 33 aa, Artificial Sequence; identical to SEQ ID NO: 17727
  GFR-binding peptide
  MOD_RES (33), (33): Xaa is C or S
  MOD_RES (11), (12), (13), (14), (15): Xaa is A or G
  MOD_RES (16), (17), (18), (19): Xaa is A or G or is absent

SEQ ID NO: 82709 - protein, 36 aa, Artificial Sequence; identical to SEQ ID NO: 49913
  GFR-binding peptide
  MOD_RES (2), (4), (35), (36): Xaa is C or S

SEQ ID NO: 82710 - protein, 41 aa, Artificial Sequence; identical to SEQ ID NO: 18561
  GFR-binding peptide
  MOD_RES (37), (37): Xaa is C or S
  MOD_RES (13), (14), (15), (16), (17): Xaa is A or G
  MOD_RES (18), (19), (20), (21): Xaa is A or G or is absent

SEQ ID NO: 82711 - protein, 42 aa, Artificial Sequence; identical to SEQ ID NO: 18562
  GFR-binding peptide
  MOD_RES (2), (4), (41): Xaa is C or S
  MOD_RES (17), (18), (19), (20), (21): Xaa is A or G
  MOD_RES (22), (23), (24), (25): Xaa is A or G or is absent

SEQ ID NO: 82712 - protein, 35 aa, Artificial Sequence; identical to SEQ ID NO: 17729
  GFR-binding peptide
  MOD_RES (35), (35): Xaa is C or S

SEQ ID NO: 82713 - protein, 37 aa, Artificial Sequence; identical to SEQ ID NO: 49917
  GFR-binding peptide
  MOD_RES (2), (4), (35), (36): Xaa is C or S

SEQ ID NO: 82714 - protein, 40 aa, Artificial Sequence; identical to SEQ ID NO: 49918
  GFR-binding peptide
  MOD_RES (1), (3), (36), (37): Xaa is C or S
  MOD_RES (14), (15), (16), (17), (18): Xaa is A or G
  MOD_RES (19), (20), (21), (22): Xaa is A or G or is absent

SEQ ID NO: 82715 - protein, 39 aa, Artificial Sequence; identical to SEQ ID NO: 18564
  GFR-binding peptide
  MOD_RES (2), (4), (38): Xaa is C or S

SEQ ID NO: 82716 - protein, 37 aa, Artificial Sequence; identical to SEQ ID NO: 17730
  GFR-binding peptide
  MOD_RES (2), (4): Xaa is C or S
  MOD_RES (16), (17), (18), (19), (20): Xaa is A or G
  MOD_RES (21), (22), (23), (24): Xaa is A or G or is absent

SEQ ID NO: 82717 - protein, 40 aa, Artificial Sequence; identical to SEQ ID NO: 18567
  GFR-binding peptide
  MOD_RES (1), (38): Xaa is C or S

SEQ ID NO: 82718 - protein, 37 aa, Artificial Sequence; identical to SEQ ID NO: 51170
  GFR-binding peptide
  MOD_RES (2), (33), (34): Xaa is C or S

SEQ ID NO: 82719 - protein, 41 aa, Artificial Sequence; identical to SEQ ID NO: 17734
  GFR-binding peptide
  MOD_RES (37), (37): Xaa is C or S
  MOD_RES (13), (14), (15), (16), (17): Xaa is A or G
  MOD_RES (18), (19), (20), (21): Xaa is A or G or is absent

SEQ ID NO: 82720 - protein, 36 aa, Artificial Sequence; identical to SEQ ID NO: 17736
  GFR-binding peptide
  MOD_RES (2), (36): Xaa is C or S

SEQ ID NO: 82721 - protein, 35 aa, Artificial Sequence; identical to SEQ ID NO: 17737
  GFR-binding peptide

SEQ ID NO: 82722 - protein, 38 aa, Artificial Sequence; identical to SEQ ID NO: 17738
  GFR-binding peptide
  MOD_RES (1), (3), (37): Xaa is C or S
  MOD_RES (15), (16), (17), (18), (19): Xaa is A or G
  MOD_RES (20), (21), (22), (23): Xaa is A or G or is absent

SEQ ID NO: 82723 - protein, 42 aa, Artificial Sequence; identical to SEQ ID NO: 18569
  GFR-binding peptide
  MOD_RES (2), (36): Xaa is C or S
  MOD_RES (14), (15), (16), (17), (18): Xaa is A or G
  MOD_RES (19), (20), (21), (22): Xaa is A or G or is absent

SEQ ID NO: 82724 - protein, 35 aa, Artificial Sequence; identical to SEQ ID NO: 49926
  GFR-binding peptide
  MOD_RES (33), (34): Xaa is C or S
  MOD_RES (11), (12), (13), (14), (15): Xaa is A or G
  MOD_RES (16), (17), (18), (19): Xaa is A or G or is absent

SEQ ID NO: 82725 - protein, 39 aa, Artificial Sequence; identical to SEQ ID NO: 51180
  GFR-binding peptide
  MOD_RES (2), (4), (37), (38): Xaa is C or S
  MOD_RES (15), (16), (17), (18), (19): Xaa is A or G
  MOD_RES (20), (21), (22), (23): Xaa is A or G or is absent

SEQ ID NO: 82726 - protein, 36 aa, Artificial Sequence; identical to SEQ ID NO: 17741
  GFR-binding peptide
  MOD_RES (2), (2): Xaa is C or S

SEQ ID NO: 82727 - protein, 41 aa, Artificial Sequence; identical to SEQ ID NO: 18571
  GFR-binding peptide
  MOD_RES (2), (36): Xaa is C or S
  MOD_RES (14), (15), (16), (17), (18): Xaa is A or G
  MOD_RES (19), (20), (21), (22): Xaa is A or G or is absent

SEQ ID NO: 82728 - protein, 42 aa, Artificial Sequence; identical to SEQ ID NO: 17742
  GFR-binding peptide
  MOD_RES (1), (3), (40): Xaa is C or S

SEQ ID NO: 82729 - protein, 38 aa, Artificial Sequence; identical to SEQ ID NO: 17743
  GFR-binding peptide
  MOD_RES (2), (36): Xaa is C or S
  MOD_RES (14), (15), (16), (17), (18): Xaa is A or G
  MOD_RES (19), (20), (21), (22): Xaa is A or G or is absent

SEQ ID NO: 82730 - protein, 36 aa, Artificial Sequence; identical to SEQ ID NO: 17744
  GFR-binding peptide
  MOD_RES (1), (1): Xaa is C or S
  MOD_RES (14), (15), (16), (17), (18): Xaa is A or G
  MOD_RES (19), (20), (21), (22): Xaa is A or G or is absent

SEQ ID NO: 82731 - protein, 37 aa, Artificial Sequence; identical to SEQ ID NO: 17745
  GFR-binding peptide
  MOD_RES (34), (34): Xaa is C or S
  MOD_RES (12), (13), (14), (15), (16): Xaa is A or G
  MOD_RES (17), (18), (19), (20): Xaa is A or G or is absent

SEQ ID NO: 82732 - protein, 41 aa, Artificial Sequence; identical to SEQ ID NO: 47409
  GFR-binding peptide
  MOD_RES (2), (4), (37), (38): Xaa is C or S
  MOD_RES (15), (16), (17), (18), (19): Xaa is A or G
  MOD_RES (20), (21), (22), (23): Xaa is A or G or is absent

SEQ ID NO: 82733 - protein, 34 aa, Artificial Sequence; identical to SEQ ID NO: 17746
  GFR-binding peptide

SEQ ID NO: 82734 - protein, 38 aa, Artificial Sequence; identical to SEQ ID NO: 17747
  GFR-binding peptide
  MOD_RES (1), (35): Xaa is C or S

SEQ ID NO: 82735 - protein, 44 aa, Artificial Sequence; identical to SEQ ID NO: 17748
  GFR-binding peptide
  MOD_RES (2), (4), (41): Xaa is C or S

SEQ ID NO: 82736 - protein, 33 aa, Artificial Sequence; identical to SEQ ID NO: 17749
  GFR-binding peptide
  MOD_RES (33), (33): Xaa is C or S
  MOD_RES (11), (12), (13), (14), (15): Xaa is A or G
  MOD_RES (16), (17), (18), (19): Xaa is A or G or is absent

SEQ ID NO: 82737 - protein, 43 aa, Artificial Sequence; identical to SEQ ID NO: 48672
  GFR-binding peptide
  MOD_RES (2), (4), (37), (38): Xaa is C or S
  MOD_RES (15), (16), (17), (18), (19): Xaa is A or G
  MOD_RES (20), (21), (22), (23): Xaa is A or G or is absent

SEQ ID NO: 82738 - protein, 36 aa, Artificial Sequence; identical to SEQ ID NO: 49940
  GFR-binding peptide
  MOD_RES (1), (3), (34), (35): Xaa is C or S

SEQ ID NO: 82739 - protein, 35 aa, Artificial Sequence; identical to SEQ ID NO: 18576
  GFR-binding peptide

SEQ ID NO: 82740 - protein, 37 aa, Artificial Sequence; identical to SEQ ID NO: 48678
  GFR-binding peptide
  MOD_RES (31), (32): Xaa is C or S

SEQ ID NO: 82741 - protein, 39 aa, Artificial Sequence; identical to SEQ ID NO: 17750
  GFR-binding peptide
  MOD_RES (35), (35): Xaa is C or S
  MOD_RES (11), (12), (13), (14), (15): Xaa is A or G
  MOD_RES (16), (17), (18), (19): Xaa is A or G or is absent

SEQ ID NO: 82742 - protein, 37 aa, Artificial Sequence; identical to SEQ ID NO: 47422
  GFR-binding peptide
  MOD_RES (1), (3), (36), (37): Xaa is C or S
  MOD_RES (14), (15), (16), (17), (18): Xaa is A or G
  MOD_RES (19), (20), (21), (22): Xaa is A or G or is absent

SEQ ID NO: 82743 - protein, 42 aa, Artificial Sequence; identical to SEQ ID NO: 17751
  GFR-binding peptide
  MOD_RES (1), (3), (40): Xaa is C or S

SEQ ID NO: 82744 - protein, 39 aa, Artificial Sequence; identical to SEQ ID NO: 18582
  GFR-binding peptide
  MOD_RES (2), (4), (38): Xaa is C or S

SEQ ID NO: 82745 - protein, 42 aa, Artificial Sequence; identical to SEQ ID NO: 17754
  GFR-binding peptide
  MOD_RES (1), (3), (37): Xaa is C or S

SEQ ID NO: 82746 - protein, 37 aa, Artificial Sequence; identical to SEQ ID NO: 48683
  GFR-binding peptide
  MOD_RES (33), (34): Xaa is C or S
  MOD_RES (11), (12), (13), (14), (15): Xaa is A or G
  MOD_RES (16), (17), (18), (19): Xaa is A or G or is absent

SEQ ID NO: 82747 - protein, 39 aa, Artificial Sequence; identical to SEQ ID NO: 18585
  GFR-binding peptide
  MOD_RES (35), (35): Xaa is C or S
  MOD_RES (11), (12), (13), (14), (15): Xaa is A or G
  MOD_RES (16), (17), (18), (19): Xaa is A or G or is absent

SEQ ID NO: 82748 - protein, 35 aa, Artificial Sequence; identical to SEQ ID NO: 49947
  GFR-binding peptide
  MOD_RES (1), (3): Xaa is C or S
  MOD_RES (14), (15), (16), (17), (18): Xaa is A or G
  MOD_RES (19), (20), (21), (22): Xaa is A or G or is absent

SEQ ID NO: 82749 - protein, 41 aa, Artificial Sequence; identical to SEQ ID NO: 17756
  GFR-binding peptide
  MOD_RES (37), (37): Xaa is C or S

SEQ ID NO: 82750 - protein, 42 aa, Artificial Sequence; identical to SEQ ID NO: 48686
  GFR-binding peptide
  MOD_RES (1), (3), (36), (37): Xaa is C or S
  MOD_RES (14), (15), (16), (17), (18): Xaa is A or G
  MOD_RES (19), (20), (21), (22): Xaa is A or G or is absent

SEQ ID NO: 82751 - protein, 35 aa, Artificial Sequence; identical to SEQ ID NO: 47428
  GFR-binding peptide
  MOD_RES (1), (34), (35): Xaa is C or S
  MOD_RES (12), (13), (14), (15), (16): Xaa is A or G
  MOD_RES (17), (18), (19), (20): Xaa is A or G or is absent

SEQ ID NO: 82752 - protein, 35 aa, Artificial Sequence; identical to SEQ ID NO: 49951
  GFR-binding peptide
  MOD_RES (1), (32), (33): Xaa is C or S

SEQ ID NO: 82753 - protein, 36 aa, Artificial Sequence; identical to SEQ ID NO: 18586
  GFR-binding peptide

SEQ ID NO: 82754 - protein, 36 aa, Artificial Sequence; identical to SEQ ID NO: 17758
  GFR-binding peptide
  MOD_RES (33), (33): Xaa is C or S

SEQ ID NO: 82755 - protein, 40 aa, Artificial Sequence; identical to SEQ ID NO: 18587
  GFR-binding peptide
  MOD_RES (1), (3), (37): Xaa is C or S

SEQ ID NO: 82756 - protein, 34 aa, Artificial Sequence; identical to SEQ ID NO: 18588
  GFR-binding peptide

SEQ ID NO: 82757 - protein, 38 aa, Artificial Sequence; identical to SEQ ID NO: 18589
  GFR-binding peptide
  MOD_RES (2), (4), (38): Xaa is C or S
  MOD_RES (16), (17), (18), (19), (20): Xaa is A or G
  MOD_RES (21), (22), (23), (24): Xaa is A or G or is absent

SEQ ID NO: 82758 - protein, 39 aa, Artificial Sequence; identical to SEQ ID NO: 49956
  GFR-binding peptide
  MOD_RES (2), (4), (37), (38): Xaa is C or S
  MOD_RES (15), (16), (17), (18), (19): Xaa is A or G
  MOD_RES (20), (21), (22), (23): Xaa is A or G or is absent

SEQ ID NO: 82759 - protein, 37 aa, Artificial Sequence; identical to SEQ ID NO: 17759
  GFR-binding peptide
  MOD_RES (36), (36): Xaa is C or S

SEQ ID NO: 82760 - protein, 39 aa, Artificial Sequence; identical to SEQ ID NO: 17761
  GFR-binding peptide
  MOD_RES (1), (3): Xaa is C or S
  MOD_RES (16), (17), (18), (19), (20): Xaa is A or G
  MOD_RES (21), (22), (23), (24): Xaa is A or G or is absent

SEQ ID NO: 82761 - protein, 43 aa, Artificial Sequence; identical to SEQ ID NO: 17762
  GFR-binding peptide
  MOD_RES (1), (3), (40): Xaa is C or S

SEQ ID NO: 82762 - protein, 41 aa, Artificial Sequence; identical to SEQ ID NO: 17764
  GFR-binding peptide
  MOD_RES (1), (3), (40): Xaa is C or S
  MOD_RES (16), (17), (18), (19), (20): Xaa is A or G
  MOD_RES (21), (22), (23), (24): Xaa is A or G or is absent

SEQ ID NO: 82763 - protein, 38 aa, Artificial Sequence; identical to SEQ ID NO: 18593
  GFR-binding peptide
  MOD_RES (1), (35): Xaa is C or S

SEQ ID NO: 82764 - protein, 42 aa, Artificial Sequence; identical to SEQ ID NO: 18594
  GFR-binding peptide
  MOD_RES (1), (3), (40): Xaa is C or S

SEQ ID NO: 82765 - protein, 40 aa, Artificial Sequence; identical to SEQ ID NO: 48695
  GFR-binding peptide
  MOD_RES (2), (35), (36): Xaa is C or S
  MOD_RES (13), (14), (15), (16), (17): Xaa is A or G
  MOD_RES (18), (19), (20), (21): Xaa is A or G or is absent

SEQ ID NO: 82766 - protein, 41 aa, Artificial Sequence; identical to SEQ ID NO: 18595
  GFR-binding peptide
  MOD_RES (1), (35): Xaa is C or S

SEQ ID NO: 82767 - protein, 40 aa, Artificial Sequence; identical to SEQ ID NO: 18596
  GFR-binding peptide
  MOD_RES (36), (36): Xaa is C or S
  MOD_RES (12), (13), (14), (15), (16): Xaa is A or G
  MOD_RES (17), (18), (19), (20): Xaa is A or G or is absent

SEQ ID NO: 82768 - protein, 39 aa, Artificial Sequence; identical to SEQ ID NO: 18597
  GFR-binding peptide
  MOD_RES (36), (36): Xaa is C or S
  MOD_RES (12), (13), (14), (15), (16): Xaa is A or G
  MOD_RES (17), (18), (19), (20): Xaa is A or G or is absent

SEQ ID NO: 82769 - protein, 36 aa, Artificial Sequence; identical to SEQ ID NO: 17765
  GFR-binding peptide
  MOD_RES (34), (34): Xaa is C or S
  MOD_RES (12), (13), (14), (15), (16): Xaa is A or G
  MOD_RES (17), (18), (19), (20): Xaa is A or G or is absent

SEQ ID NO: 82770 - protein, 35 aa, Artificial Sequence; identical to SEQ ID NO: 17766
  GFR-binding peptide
  MOD_RES (2), (2): Xaa is C or S
  MOD_RES (14), (15), (16), (17), (18): Xaa is A or G
  MOD_RES (19), (20), (21), (22): Xaa is A or G or is absent

SEQ ID NO: 82771 - protein, 37 aa, Artificial Sequence; identical to SEQ ID NO: 51220
  GFR-binding peptide
  MOD_RES (33), (34): Xaa is C or S
  MOD_RES (11), (12), (13), (14), (15): Xaa is A or G
  MOD_RES (16), (17), (18), (19): Xaa is A or G or is absent

SEQ ID NO: 82772 - protein, 33 aa, Artificial Sequence; identical to SEQ ID NO: 48707
  GFR-binding peptide
  MOD_RES (31), (32): Xaa is C or S

SEQ ID NO: 82773 - protein, 41 aa, Artificial Sequence; identical to SEQ ID NO: 17769
  GFR-binding peptide
  MOD_RES (2), (36): Xaa is C or S

SEQ ID NO: 82774 - protein, 38 aa, Artificial Sequence; identical to SEQ ID NO: 49971
  GFR-binding peptide
  MOD_RES (1), (3), (36), (37): Xaa is C or S
  MOD_RES (14), (15), (16), (17), (18): Xaa is A or G
  MOD_RES (19), (20), (21), (22): Xaa is A or G or is absent

SEQ ID NO: 82775 - protein, 32 aa, Artificial Sequence; identical to SEQ ID NO: 51223
  GFR-binding peptide
  MOD_RES (2), (2): Xaa is C or S

SEQ ID NO: 82776 - protein, 37 aa, Artificial Sequence; identical to SEQ ID NO: 51230
  GFR-binding peptide
  MOD_RES (1), (32), (33): Xaa is C or S

SEQ ID NO: 82777 - protein, 32 aa, Artificial Sequence; identical to SEQ ID NO: 48712
  GFR-binding peptide
  MOD_RES (31), (32): Xaa is C or S

SEQ ID NO: 82778 - protein, 35 aa, Artificial Sequence; identical to SEQ ID NO: 18605
  GFR-binding peptide
  MOD_RES (1), (35): Xaa is C or S

SEQ ID NO: 82779 - protein, 38 aa, Artificial Sequence; identical to SEQ ID NO: 17770
  GFR-binding peptide
  MOD_RES (37), (37): Xaa is C or S
  MOD_RES (13), (14), (15), (16), (17): Xaa is A or G
  MOD_RES (18), (19), (20), (21): Xaa is A or G or is absent

SEQ ID NO: 82780 - protein, 39 aa, Artificial Sequence; identical to SEQ ID NO: 49976
  GFR-binding peptide
  MOD_RES (33), (34): Xaa is C or S
  MOD_RES (11), (12), (13), (14), (15): Xaa is A or G
  MOD_RES (16), (17), (18), (19): Xaa is A or G or is absent

SEQ ID NO: 82781 - protein, 36 aa, Artificial Sequence; identical to SEQ ID NO: 17771
  GFR-binding peptide
  MOD_RES (33), (33): Xaa is C or S

SEQ ID NO: 82782 - protein, 43 aa, Artificial Sequence; identical to SEQ ID NO: 18608
  GFR-binding peptide
  MOD_RES (2), (39): Xaa is C or S

SEQ ID NO: 82783 - protein, 36 aa, Artificial Sequence; identical to SEQ ID NO: 48719
  GFR-binding peptide
  MOD_RES (33), (34): Xaa is C or S
  MOD_RES (11), (12), (13), (14), (15): Xaa is A or G
  MOD_RES (16), (17), (18), (19): Xaa is A or G or is absent

SEQ ID NO: 82784 - protein, 41 aa, Artificial Sequence; identical to SEQ ID NO: 18609
  GFR-binding peptide
  MOD_RES (1), (3), (40): Xaa is C or S

SEQ ID NO: 82785 - protein, 36 aa, Artificial Sequence; identical to SEQ ID NO: 49977
  GFR-binding peptide
  MOD_RES (2), (33), (34): Xaa is C or S

SEQ ID NO: 82786 - protein, 35 aa, Artificial Sequence; identical to SEQ ID NO: 17773
  GFR-binding peptide
  MOD_RES (1), (35): Xaa is C or S
  MOD_RES (13), (14), (15), (16), (17): Xaa is A or G
  MOD_RES (18), (19), (20), (21): Xaa is A or G or is absent

SEQ ID NO: 82787 - protein, 42 aa, Artificial Sequence; identical to SEQ ID NO: 49978
  GFR-binding peptide
  MOD_RES (2), (4), (37), (38): Xaa is C or S
  MOD_RES (15), (16), (17), (18), (19): Xaa is A or G
  MOD_RES (20), (21), (22), (23): Xaa is A or G or is absent

SEQ ID NO: 82788 - protein, 37 aa, Artificial Sequence; identical to SEQ ID NO: 18610
  GFR-binding peptide
  MOD_RES (2), (4): Xaa is C or S

SEQ ID NO: 82789 - protein, 31 aa, Artificial Sequence; identical to SEQ ID NO: 51237
  GFR-binding peptide
  MOD_RES (31), (31): Xaa is C or S

SEQ ID NO: 82790 - protein, 37 aa, Artificial Sequence; identical to SEQ ID NO: 18611
  GFR-binding peptide
  MOD_RES (2), (36): Xaa is C or S

SEQ ID NO: 82791 - protein, 41 aa, Artificial Sequence; identical to SEQ ID NO: 49983
  GFR-binding peptide
  MOD_RES (2), (4), (37), (38): Xaa is C or S
  MOD_RES (15), (16), (17), (18), (19): Xaa is A or G
  MOD_RES (20), (21), (22), (23): Xaa is A or G or is absent

SEQ ID NO: 82792 - protein, 36 aa, Artificial Sequence; identical to SEQ ID NO: 47464
  GFR-binding peptide
  MOD_RES (2), (35), (36): Xaa is C or S
  MOD_RES (13), (14), (15), (16), (17): Xaa is A or G
  MOD_RES (18), (19), (20), (21): Xaa is A or G or is absent

SEQ ID NO: 82793 - protein, 40 aa, Artificial Sequence; identical to SEQ ID NO: 17774
  GFR-binding peptide
  MOD_RES (1), (38): Xaa is C or S
  MOD_RES (14), (15), (16), (17), (18): Xaa is A or G
  MOD_RES (19), (20), (21), (22): Xaa is A or G or is absent

SEQ ID NO: 82794 - protein, 33 aa, Artificial Sequence; identical to SEQ ID NO: 18614
  GFR-binding peptide
  MOD_RES (12), (13), (14), (15), (16): Xaa is A or G
  MOD_RES (17), (18), (19), (20): Xaa is A or G or is absent

SEQ ID NO: 82795 - protein, 38 aa, Artificial Sequence; identical to SEQ ID NO: 17776
  GFR-binding peptide
  MOD_RES (1), (3), (37): Xaa is C or S

SEQ ID NO: 82796 - protein, 34 aa, Artificial Sequence; identical to SEQ ID NO: 17778
  GFR-binding peptide
  MOD_RES (1), (1): Xaa is C or S

SEQ ID NO: 82797 - protein, 36 aa, Artificial Sequence; identical to SEQ ID NO: 49991
  GFR-binding peptide
  MOD_RES (1), (32), (33): Xaa is C or S

SEQ ID NO: 82798 - protein, 37 aa, Artificial Sequence; identical to SEQ ID NO: 17779
  GFR-binding peptide
  MOD_RES (36), (36): Xaa is C or S

SEQ ID NO: 82799 - protein, 39 aa, Artificial Sequence; identical to SEQ ID NO: 18618
  GFR-binding peptide
  MOD_RES (2), (4): Xaa is C or S
  MOD_RES (17), (18), (19), (20), (21): Xaa is A or G
  MOD_RES (22), (23), (24), (25): Xaa is A or G or is absent

SEQ ID NO: 82800 - protein, 41 aa, Artificial Sequence; identical to SEQ ID NO: 49992
  GFR-binding peptide
  MOD_RES (2), (35), (36): Xaa is C or S
  MOD_RES (13), (14), (15), (16), (17): Xaa is A or G
  MOD_RES (18), (19), (20), (21): Xaa is A or G or is absent

SEQ ID NO: 82801 - protein, 39 aa, Artificial Sequence; identical to SEQ ID NO: 17780
  GFR-binding peptide
  MOD_RES (1), (38): Xaa is C or S

SEQ ID NO: 82802 - protein, 35 aa, Artificial Sequence; identical to SEQ ID NO: 47473
  GFR-binding peptide
  MOD_RES (1), (32), (33): Xaa is C or S

SEQ ID NO: 82803 - protein, 38 aa, Artificial Sequence; identical to SEQ ID NO: 48746
  GFR-binding peptide
  MOD_RES (2), (33), (34): Xaa is C or S

SEQ ID NO: 82804 - protein, 35 aa, Artificial Sequence; identical to SEQ ID NO: 17782
  GFR-binding peptide
  MOD_RES (1), (1): Xaa is C or S
  MOD_RES (14), (15), (16), (17), (18): Xaa is A or G
  MOD_RES (19), (20), (21), (22): Xaa is A or G or is absent

SEQ ID NO: 82805 - protein, 37 aa, Artificial Sequence; identical to SEQ ID NO: 18622
  GFR-binding peptide
  MOD_RES (2), (36): Xaa is C or S

SEQ ID NO: 82806 - protein, 43 aa, Artificial Sequence; identical to SEQ ID NO: 18623
  GFR-binding peptide
  MOD_RES (2), (4), (41): Xaa is C or S
  MOD_RES (17), (18), (19), (20), (21): Xaa is A or G
  MOD_RES (22), (23), (24), (25): Xaa is A or G or is absent

SEQ ID NO: 82807 - protein, 37 aa, Artificial Sequence; identical to SEQ ID NO: 51255
  GFR-binding peptide
  MOD_RES (1), (34), (35): Xaa is C or S
  MOD_RES (12), (13), (14), (15), (16): Xaa is A or G
  MOD_RES (17), (18), (19), (20): Xaa is A or G or is absent

SEQ ID NO: 82808 - protein, 40 aa, Artificial Sequence; identical to SEQ ID NO: 17785
  GFR-binding peptide
  MOD_RES (2), (4), (38): Xaa is C or S

SEQ ID NO: 82809 - protein, 39 aa, Artificial Sequence; identical to SEQ ID NO: 50001
  GFR-binding peptide
  MOD_RES (2), (33), (34): Xaa is C or S

SEQ ID NO: 82810 - protein, 43 aa, Artificial Sequence; identical to SEQ ID NO: 17786
  GFR-binding peptide
  MOD_RES (1), (3), (37): Xaa is C or S
  MOD_RES (15), (16), (17), (18), (19): Xaa is A or G
  MOD_RES (20), (21), (22), (23): Xaa is A or G or is absent

SEQ ID NO: 82811 - protein, 41 aa, Artificial Sequence; identical to SEQ ID NO: 18626
  GFR-binding peptide
  MOD_RES (2), (4), (38): Xaa is C or S

SEQ ID NO: 82812 - protein, 36 aa, Artificial Sequence; identical to SEQ ID NO: 48759
  GFR-binding peptide
  MOD_RES (33), (34): Xaa is C or S
  MOD_RES (11), (12), (13), (14), (15): Xaa is A or G
  MOD_RES (16), (17), (18), (19): Xaa is A or G or is absent

SEQ ID NO: 82813 - protein, 39 aa, Artificial Sequence; identical to SEQ ID NO: 47484
  GFR-binding peptide
  MOD_RES (33), (34): Xaa is C or S
  MOD_RES (11), (12), (13), (14), (15): Xaa is A or G
  MOD_RES (16), (17), (18), (19): Xaa is A or G or is absent

SEQ ID NO: 82814 - protein, 39 aa, Artificial Sequence; identical to SEQ ID NO: 47485
  GFR-binding peptide
  MOD_RES (1), (3), (34), (35): Xaa is C or S

SEQ ID NO: 82815 - protein, 40 aa, Artificial Sequence; identical to SEQ ID NO: 18628
  GFR-binding peptide
  MOD_RES (2), (4), (38): Xaa is C or S

SEQ ID NO: 82816 - protein, 37 aa, Artificial Sequence; identical to SEQ ID NO: 51262
  GFR-binding peptide
  MOD_RES (33), (34): Xaa is C or S
  MOD_RES (11), (12), (13), (14), (15): Xaa is A or G
  MOD_RES (16), (17), (18), (19): Xaa is A or G or is absent

SEQ ID NO: 82817 - protein, 39 aa, Artificial Sequence; identical to SEQ ID NO: 18629
  GFR-binding peptide
  MOD_RES (1), (3): Xaa is C or S

SEQ ID NO: 82818 - protein, 37 aa, Artificial Sequence; identical to SEQ ID NO: 17789
  GFR-binding peptide
  MOD_RES (2), (2): Xaa is C or S

SEQ ID NO: 82819 - protein, 39 aa, Artificial Sequence; identical to SEQ ID NO: 18631
  GFR-binding peptide
  MOD_RES (37), (37): Xaa is C or S

SEQ ID NO: 82820 - protein, 40 aa, Artificial Sequence; identical to SEQ ID NO: 18632
  GFR-binding peptide
  MOD_RES (34), (34): Xaa is C or S

SEQ ID NO: 82821 - protein, 34 aa, Artificial Sequence; identical to SEQ ID NO: 18633
  GFR-binding peptide

SEQ ID NO: 82822 - protein, 44 aa, Artificial Sequence; identical to SEQ ID NO: 17791
  GFR-binding peptide
  MOD_RES (2), (4), (38): Xaa is C or S

SEQ ID NO: 82823 - protein, 39 aa, Artificial Sequence; identical to SEQ ID NO: 17792
  GFR-binding peptide
  MOD_RES (1), (3), (37): Xaa is C or S
  MOD_RES (15), (16), (17), (18), (19): Xaa is A or G
  MOD_RES (20), (21), (22), (23): Xaa is A or G or is absent

SEQ ID NO: 82824 - protein, 39 aa, Artificial Sequence; identical to SEQ ID NO: 18635
  GFR-binding peptide
  MOD_RES (1), (3), (37): Xaa is C or S
  MOD_RES (15), (16), (17), (18), (19): Xaa is A or G
  MOD_RES (20), (21), (22), (23): Xaa is A or G or is absent

SEQ ID NO: 82825 - protein, 38 aa, Artificial Sequence; identical to SEQ ID NO: 50019
  GFR-binding peptide
  MOD_RES (33), (34): Xaa is C or S
  MOD_RES (11), (12), (13), (14), (15): Xaa is A or G
  MOD_RES (16), (17), (18), (19): Xaa is A or G or is absent

SEQ ID NO: 82826 - protein, 35 aa, Artificial Sequence; identical to SEQ ID NO: 18638
  GFR-binding peptide
  MOD_RES (12), (13), (14), (15), (16): Xaa is A or G
  MOD_RES (17), (18), (19), (20): Xaa is A or G or is absent

SEQ ID NO: 82827 - protein, 41 aa, Artificial Sequence; identical to SEQ ID NO: 18639
  GFR-binding peptide
  MOD_RES (2), (39): Xaa is C or S
  MOD_RES (15), (16), (17), (18), (19): Xaa is A or G
  MOD_RES (20), (21), (22), (23): Xaa is A or G or is absent

SEQ ID NO: 82828 - protein, 43 aa, Artificial Sequence; identical to SEQ ID NO: 18640
  GFR-binding peptide
  MOD_RES (1), (3), (40): Xaa is C or S
  MOD_RES (16), (17), (18), (19), (20): Xaa is A or G
  MOD_RES (21), (22), (23), (24): Xaa is A or G or is absent

SEQ ID NO: 82829 - protein, 31 aa, Artificial Sequence; identical to SEQ ID NO: 51270
  GFR-binding peptide
  MOD_RES (1), (1): Xaa is C or S

SEQ ID NO: 82830 - protein, 38 aa, Artificial Sequence; identical to SEQ ID NO: 18644
  GFR-binding peptide
  MOD_RES (2), (36): Xaa is C or S

SEQ ID NO: 82831 - protein, 38 aa, Artificial Sequence; identical to SEQ ID NO: 50029
  GFR-binding peptide
  MOD_RES (1), (32), (33): Xaa is C or S

SEQ ID NO: 82832 - protein, 35 aa, Artificial Sequence; identical to SEQ ID NO: 50030
  GFR-binding peptide
  MOD_RES (1), (3), (34), (35): Xaa is C or S

SEQ ID NO: 82833 - protein, 41 aa, Artificial Sequence; identical to SEQ ID NO: 18647
  GFR-binding peptide
  MOD_RES (2), (4), (41): Xaa is C or S
  MOD_RES (17), (18), (19), (20), (21): Xaa is A or G
  MOD_RES (22), (23), (24), (25): Xaa is A or G or is absent

SEQ ID NO: 82834 - protein, 33 aa, Artificial Sequence; identical to SEQ ID NO: 51282
  GFR-binding peptide
  MOD_RES (31), (32): Xaa is C or S

SEQ ID NO: 82835 - protein, 33 aa, Artificial Sequence; identical to SEQ ID NO: 51285
  GFR-binding peptide
  MOD_RES (1), (1): Xaa is C or S
  MOD_RES (12), (13), (14), (15), (16): Xaa is A or G
  MOD_RES (17), (18), (19), (20): Xaa is A or G or is absent

SEQ ID NO: 82836 - protein, 34 aa, Artificial Sequence; identical to SEQ ID NO: 18649
  GFR-binding peptide
  MOD_RES (34), (34): Xaa is C or S
  MOD_RES (12), (13), (14), (15), (16): Xaa is A or G
  MOD_RES (17), (18), (19), (20): Xaa is A or G or is absent

SEQ ID NO: 82837 - protein, 41 aa, Artificial Sequence; identical to SEQ ID NO: 17801
  GFR-binding peptide
  MOD_RES (1), (3), (40): Xaa is C or S

SEQ ID NO: 82838 - protein, 37 aa, Artificial Sequence; identical to SEQ ID NO: 17803
  GFR-binding peptide
  MOD_RES (34), (34): Xaa is C or S

SEQ ID NO: 82839 - protein, 41 aa, Artificial Sequence; identical to SEQ ID NO: 18650
  GFR-binding peptide
  MOD_RES (2), (4), (38): Xaa is C or S
  MOD_RES (16), (17), (18), (19), (20): Xaa is A or G
  MOD_RES (21), (22), (23), (24): Xaa is A or G or is absent

SEQ ID NO: 82840 - protein, 37 aa, Artificial Sequence; identical to SEQ ID NO: 17804
  GFR-binding peptide
  MOD_RES (1), (35): Xaa is C or S

SEQ ID NO: 82841 - protein, 36 aa, Artificial Sequence; identical to SEQ ID NO: 51288
  GFR-binding peptide
  MOD_RES (1), (3), (36): Xaa is C or S
  MOD_RES (14), (15), (16), (17), (18): Xaa is A or G
  MOD_RES (19), (20), (21), (22): Xaa is A or G or is absent

SEQ ID NO: 82842 - protein, 35 aa, Artificial Sequence; identical to SEQ ID NO: 18652
  GFR-binding peptide
  MOD_RES (1), (35): Xaa is C or S
  MOD_RES (13), (14), (15), (16), (17): Xaa is A or G
  MOD_RES (18), (19), (20), (21): Xaa is A or G or is absent

SEQ ID NO: 82843 - protein, 38 aa, Artificial Sequence; identical to SEQ ID NO: 18654
  GFR-binding peptide
  MOD_RES (1), (35): Xaa is C or S
  MOD_RES (13), (14), (15), (16), (17): Xaa is A or G
  MOD_RES (18), (19), (20), (21): Xaa is A or G or is absent

SEQ ID NO: 82844 - protein, 41 aa, Artificial Sequence; identical to SEQ ID NO: 50041
  GFR-binding peptide
  MOD_RES (2), (35), (36): Xaa is C or S
  MOD_RES (13), (14), (15), (16), (17): Xaa is A or G
  MOD_RES (18), (19), (20), (21): Xaa is A or G or is absent

SEQ ID NO: 82845 - protein, 37 aa, Artificial Sequence; identical to SEQ ID NO: 17805
  GFR-binding peptide
  MOD_RES (2), (4): Xaa is C or S

SEQ ID NO: 82846 - protein, 36 aa, Artificial Sequence; identical to SEQ ID NO: 47517
  GFR-binding peptide
  MOD_RES (1), (3), (36): Xaa is C or S
  MOD_RES (14), (15), (16), (17), (18): Xaa is A or G
  MOD_RES (19), (20), (21), (22): Xaa is A or G or is absent

SEQ ID NO: 82847 - protein, 40 aa, Artificial Sequence; identical to SEQ ID NO: 18655
  GFR-binding peptide
  MOD_RES (36), (36): Xaa is C or S

SEQ ID NO: 82848 - protein, 40 aa, Artificial Sequence; identical to SEQ ID NO: 50044
  GFR-binding peptide
  MOD_RES (2), (35), (36): Xaa is C or S
  MOD_RES (13), (14), (15), (16), (17): Xaa is A or G
  MOD_RES (18), (19), (20), (21): Xaa is A or G or is absent

SEQ ID NO: 82849 - protein, 39 aa, Artificial Sequence; identical to SEQ ID NO: 47522
  GFR-binding peptide
  MOD_RES (1), (3), (34), (35): Xaa is C or S

SEQ ID NO: 82850 - protein, 39 aa, Artificial Sequence; identical to SEQ ID NO: 50046
  GFR-binding peptide
  MOD_RES (1), (3), (36), (37): Xaa is C or S
  MOD_RES (14), (15), (16), (17), (18): Xaa is A or G
  MOD_RES (19), (20), (21), (22): Xaa is A or G or is absent

SEQ ID NO: 82851 - protein, 42 aa, Artificial Sequence; identical to SEQ ID NO: 48805
  GFR-binding peptide
  MOD_RES (1), (3), (36), (37): Xaa is C or S
  MOD_RES (14), (15), (16), (17), (18): Xaa is A or G
  MOD_RES (19), (20), (21), (22): Xaa is A or G or is absent

SEQ ID NO: 82852 - protein, 34 aa, Artificial Sequence; identical to SEQ ID NO: 17808
  GFR-binding peptide

SEQ ID NO: 82853 - protein, 37 aa, Artificial Sequence; identical to SEQ ID NO: 47527
  GFR-binding peptide
  MOD_RES (1), (3), (34), (35): Xaa is C or S

SEQ ID NO: 82854 - protein, 37 aa, Artificial Sequence; identical to SEQ ID NO: 51303
  GFR-binding peptide
  MOD_RES (1), (32), (33): Xaa is C or S

SEQ ID NO: 82855 - protein, 41 aa, Artificial Sequence; identical to SEQ ID NO: 18661
  GFR-binding peptide
  MOD_RES (1), (38): Xaa is C or S

SEQ ID NO: 82856 - protein, 36 aa, Artificial Sequence; identical to SEQ ID NO: 18663
  GFR-binding peptide
  MOD_RES (34), (34): Xaa is C or S

SEQ ID NO: 82857 - protein, 38 aa, Artificial Sequence; identical to SEQ ID NO: 17813
  GFR-binding peptide
  MOD_RES (2), (4), (38): Xaa is C or S

SEQ ID NO: 82858 - protein, 40 aa, Artificial Sequence; identical to SEQ ID NO: 18665
  GFR-binding peptide
  MOD_RES (1), (3), (40): Xaa is C or S
  MOD_RES (16), (17), (18), (19), (20): Xaa is A or G
  MOD_RES (21), (22), (23), (24): Xaa is A or G or is absent

SEQ ID NO: 82859 - protein, 43 aa, Artificial Sequence; identical to SEQ ID NO: 17815
  GFR-binding peptide
  MOD_RES (2), (4), (41): Xaa is C or S

SEQ ID NO: 82860 - protein, 42 aa, Artificial Sequence; identical to SEQ ID NO: 17816
  GFR-binding peptide
  MOD_RES (2), (4), (41): Xaa is C or S
  MOD_RES (17), (18), (19), (20), (21): Xaa is A or G
  MOD_RES (22), (23), (24), (25): Xaa is A or G or is absent

SEQ ID NO: 82861 - protein, 40 aa, Artificial Sequence; identical to SEQ ID NO: 50060
  GFR-binding peptide
  MOD_RES (1), (34), (35): Xaa is C or S
  MOD_RES (12), (13), (14), (15), (16): Xaa is A or G
  MOD_RES (17), (18), (19), (20): Xaa is A or G or is absent

SEQ ID NO: 82862 - protein, 37 aa, Artificial Sequence; identical to SEQ ID NO: 18667
  GFR-binding peptide
  MOD_RES (2), (4): Xaa is C or S
  MOD_RES (16), (17), (18), (19), (20): Xaa is A or G
  MOD_RES (21), (22), (23), (24): Xaa is A or G or is absent

SEQ ID NO: 82863 - protein, 41 aa, Artificial Sequence; identical to SEQ ID NO: 48816
  GFR-binding peptide
  MOD_RES (2), (35), (36): Xaa is C or S
  MOD_RES (13), (14), (15), (16), (17): Xaa is A or G
  MOD_RES (18), (19), (20), (21): Xaa is A or G or is absent

SEQ ID NO: 82864 - protein, 38 aa, Artificial Sequence; identical to SEQ ID NO: 51311
  GFR-binding peptide
  MOD_RES (2), (33), (34): Xaa is C or S

SEQ ID NO: 82865 - protein, 34 aa, Artificial Sequence; identical to SEQ ID NO: 51312
  GFR-binding peptide
  MOD_RES (1), (32), (33): Xaa is C or S

SEQ ID NO: 82866 - protein, 39 aa, Artificial Sequence; identical to SEQ ID NO: 18668
  GFR-binding peptide
  MOD_RES (36), (36): Xaa is C or S

SEQ ID NO: 82867 - protein, 32 aa, Artificial Sequence; identical to SEQ ID NO: 18669
  GFR-binding peptide
  MOD_RES (11), (12), (13), (14), (15): Xaa is A or G
  MOD_RES (16), (17), (18), (19): Xaa is A or G or is absent

SEQ ID NO: 82868 - protein, 31 aa, Artificial Sequence; identical to SEQ ID NO: 48821
  GFR-binding peptide
  MOD_RES (31), (31): Xaa is C or S

SEQ ID NO: 82869 - protein, 37 aa, Artificial Sequence; identical to SEQ ID NO: 18670
  GFR-binding peptide
  MOD_RES (1), (3): Xaa is C or S
  MOD_RES (16), (17), (18), (19), (20): Xaa is A or G
  MOD_RES (21), (22), (23), (24): Xaa is A or G or is absent

SEQ ID NO: 82870 - protein, 42 aa, Artificial Sequence; identical to SEQ ID NO: 17821
  GFR-binding peptide
  MOD_RES (1), (38): Xaa is C or S
  MOD_RES (14), (15), (16), (17), (18): Xaa is A or G
  MOD_RES (19), (20), (21), (22): Xaa is A or G or is absent

SEQ ID NO: 82871 - protein, 40 aa, Artificial Sequence; identical to SEQ ID NO: 18671
  GFR-binding peptide
  MOD_RES (1), (3), (37): Xaa is C or S
  MOD_RES (15), (16), (17), (18), (19): Xaa is A or G
  MOD_RES (20), (21), (22), (23): Xaa is A or G or is absent

SEQ ID NO: 82872 - protein, 36 aa, Artificial Sequence; identical to SEQ ID NO: 50062
  GFR-binding peptide
  MOD_RES (1), (3), (34), (35): Xaa is C or S

SEQ ID NO: 82873 - protein, 39 aa, Artificial Sequence; identical to SEQ ID NO: 17822
  GFR-binding peptide
  MOD_RES (2), (39): Xaa is C or S

SEQ ID NO: 82874 - protein, 37 aa, Artificial Sequence; identical to SEQ ID NO: 51315
  GFR-binding peptide
  MOD_RES (1), (3), (34), (35): Xaa is C or S

SEQ ID NO: 82875 - protein, 38 aa, Artificial Sequence; identical to SEQ ID NO: 17823
  GFR-binding peptide
  MOD_RES (1), (38): Xaa is C or S
  MOD_RES (14), (15), (16), (17), (18): Xaa is A or G
  MOD_RES (19), (20), (21), (22): Xaa is A or G or is absent

SEQ ID NO: 82876 - protein, 34 aa, Artificial Sequence; identical to SEQ ID NO: 18673
  GFR-binding peptide
  MOD_RES (1), (1): Xaa is C or S
  MOD_RES (13), (14), (15), (16), (17): Xaa is A or G
  MOD_RES (18), (19), (20), (21): Xaa is A or G or is absent

SEQ ID NO: 82877 - protein, 37 aa, Artificial Sequence; identical to SEQ ID NO: 47547
  GFR-binding peptide
  MOD_RES (2), (4), (35), (36): Xaa is C or S

SEQ ID NO: 82878 - protein, 36 aa, Artificial Sequence; identical to SEQ ID NO: 50066
  GFR-binding peptide
  MOD_RES (1), (34), (35): Xaa is C or S
  MOD_RES (12), (13), (14), (15), (16): Xaa is A or G
  MOD_RES (17), (18), (19), (20): Xaa is A or G or is absent

SEQ ID NO: 82879 - protein, 37 aa, Artificial Sequence; identical to SEQ ID NO: 51320
  GFR-binding peptide
  MOD_RES (1), (3), (34), (35): Xaa is C or S

SEQ ID NO: 82880 - protein, 38 aa, Artificial Sequence; identical to SEQ ID NO: 18678
  GFR-binding peptide
  MOD_RES (1), (3), (37): Xaa is C or S
  MOD_RES (15), (16), (17), (18), (19): Xaa is A or G
  MOD_RES (20), (21), (22), (23): Xaa is A or G or is absent

SEQ ID NO: 82881 - protein, 38 aa, Artificial Sequence; identical to SEQ ID NO: 17829
  GFR-binding peptide
  MOD_RES (1), (38): Xaa is C or S
  MOD_RES (14), (15), (16), (17), (18): Xaa is A or G
  MOD_RES (19), (20), (21), (22): Xaa is A or G or is absent

SEQ ID NO: 82882 - protein, 42 aa, Artificial Sequence; identical to SEQ ID NO: 17830
  GFR-binding peptide
  MOD_RES (2), (39): Xaa is C or S

SEQ ID NO: 82883 - protein, 39 aa, Artificial Sequence; identical to SEQ ID NO: 18681
  GFR-binding peptide
  MOD_RES (2), (36): Xaa is C or S
  MOD_RES (14), (15), (16), (17), (18): Xaa is A or G
  MOD_RES (19), (20), (21), (22): Xaa is A or G or is absent

SEQ ID NO: 82884 - protein, 35 aa, Artificial Sequence; identical to SEQ ID NO: 51325
  GFR-binding peptide
  MOD_RES (2), (33), (34): Xaa is C or S

SEQ ID NO: 82885 - protein, 36 aa, Artificial Sequence; identical to SEQ ID NO: 18682
  GFR-binding peptide
  MOD_RES (36), (36): Xaa is C or S
  MOD_RES (12), (13), (14), (15), (16): Xaa is A or G
  MOD_RES (17), (18), (19), (20): Xaa is A or G or is absent

SEQ ID NO: 82886 - protein, 38 aa, Artificial Sequence; identical to SEQ ID NO: 51328
  GFR-binding peptide
  MOD_RES (1), (32), (33): Xaa is C or S

SEQ ID NO: 82887 - protein, 35 aa, Artificial Sequence; identical to SEQ ID NO: 50082
  GFR-binding peptide
  MOD_RES (1), (34), (35): Xaa is C or S
  MOD_RES (12), (13), (14), (15), (16): Xaa is A or G
  MOD_RES (17), (18), (19), (20): Xaa is A or G or is absent

SEQ ID NO: 82888 - protein, 39 aa, Artificial Sequence; identical to SEQ ID NO: 17836
  GFR-binding peptide
  MOD_RES (34), (34): Xaa is C or S
  MOD_RES (12), (13), (14), (15), (16): Xaa is A or G
  MOD_RES (17), (18), (19), (20): Xaa is A or G or is absent

SEQ ID NO: 82889 - protein, 43 aa, Artificial Sequence; identical to SEQ ID NO: 51329
  GFR-binding peptide
  MOD_RES (2), (4), (37), (38): Xaa is C or S
  MOD_RES (15), (16), (17), (18), (19): Xaa is A or G
  MOD_RES (20), (21), (22), (23): Xaa is A or G or is absent

SEQ ID NO: 82890 - protein, 41 aa, Artificial Sequence; identical to SEQ ID NO: 18684
  GFR-binding peptide
  MOD_RES (2), (36): Xaa is C or S
  MOD_RES (14), (15), (16), (17), (18): Xaa is A or G
  MOD_RES (19), (20), (21), (22): Xaa is A or G or is absent

SEQ ID NO: 82891 - protein, 34 aa, Artificial Sequence; identical to SEQ ID NO: 18686
  GFR-binding peptide
  MOD_RES (1), (1): Xaa is C or S

SEQ ID NO: 82892 - protein, 34 aa, Artificial Sequence; identical to SEQ ID NO: 48840
  GFR-binding peptide
  MOD_RES (1), (34): Xaa is C or S
  MOD_RES (12), (13), (14), (15), (16): Xaa is A or G
  MOD_RES (17), (18), (19), (20): Xaa is A or G or is absent

SEQ ID NO: 82893 - protein, 41 aa, Artificial Sequence; identical to SEQ ID NO: 18688
  GFR-binding peptide
  MOD_RES (1), (3), (37): Xaa is C or S
  MOD_RES (15), (16), (17), (18), (19): Xaa is A or G
  MOD_RES (20), (21), (22), (23): Xaa is A or G or is absent

SEQ ID NO: 82894 - protein, 38 aa, Artificial Sequence; identical to SEQ ID NO: 47573
  GFR-binding peptide
  MOD_RES (2), (4), (37), (38): Xaa is C or S
  MOD_RES (15), (16), (17), (18), (19): Xaa is A or G
  MOD_RES (20), (21), (22), (23): Xaa is A or G or is absent

SEQ ID NO: 82895 - protein, 39 aa, Artificial Sequence; identical to SEQ ID NO: 17837
  GFR-binding peptide
  MOD_RES (2), (4), (38): Xaa is C or S

SEQ ID NO: 82896 - protein, 37 aa, Artificial Sequence; identical to SEQ ID NO: 51337
  GFR-binding peptide
  MOD_RES (2), (33), (34): Xaa is C or S

SEQ ID NO: 82897 - protein, 38 aa, Artificial Sequence; identical to SEQ ID NO: 51341
  GFR-binding peptide
  MOD_RES (2), (4), (37), (38): Xaa is C or S
  MOD_RES (15), (16), (17), (18), (19): Xaa is A or G
  MOD_RES (20), (21), (22), (23): Xaa is A or G or is absent

SEQ ID NO: 82898 - protein, 42 aa, Artificial Sequence; identical to SEQ ID NO: 50088
  GFR-binding peptide
  MOD_RES (2), (4), (37), (38): Xaa is C or S
  MOD_RES (15), (16), (17), (18), (19): Xaa is A or G
  MOD_RES (20), (21), (22), (23): Xaa is A or G or is absent

SEQ ID NO: 82899 - protein, 35 aa, Artificial Sequence; identical to SEQ ID NO: 47582
  GFR-binding peptide
  MOD_RES (2), (33), (34): Xaa is C or S

SEQ ID NO: 82900 - protein, 37 aa, Artificial Sequence; identical to SEQ ID NO: 18694
  GFR-binding peptide
  MOD_RES (1), (35): Xaa is C or S

SEQ ID NO: 82901 - protein, 41 aa, Artificial Sequence; identical to SEQ ID NO: 18695
  GFR-binding peptide
  MOD_RES (1), (35): Xaa is C or S
  MOD_RES (13), (14), (15), (16), (17): Xaa is A or G
  MOD_RES (18), (19), (20), (21): Xaa is A or G or is absent

SEQ ID NO: 82902 - protein, 34 aa, Artificial Sequence; identical to SEQ ID NO: 48851
  GFR-binding peptide
  MOD_RES (2), (4): Xaa is C or S

SEQ ID NO: 82903 - protein, 43 aa, Artificial Sequence; identical to SEQ ID NO: 18696
  GFR-binding peptide
  MOD_RES (2), (39): Xaa is C or S

SEQ ID NO: 82904 - protein, 38 aa, Artificial Sequence; identical to SEQ ID NO: 47583
  GFR-binding peptide
  MOD_RES (1), (3), (34), (35): Xaa is C or S

SEQ ID NO: 82905 - protein, 37 aa, Artificial Sequence; identical to SEQ ID NO: 17840
  GFR-binding peptide
  MOD_RES (2), (36): Xaa is C or S
  MOD_RES (14), (15), (16), (17), (18): Xaa is A or G
  MOD_RES (19), (20), (21), (22): Xaa is A or G or is absent

SEQ ID NO: 82906 - protein, 44 aa, Artificial Sequence; identical to SEQ ID NO: 17841
  GFR-binding peptide
  MOD_RES (2), (4), (38): Xaa is C or S
  MOD_RES (16), (17), (18), (19), (20): Xaa is A or G
  MOD_RES (21), (22), (23), (24): Xaa is A or G or is absent

SEQ ID NO: 82907 - protein, 37 aa, Artificial Sequence; identical to SEQ ID NO: 18697
  GFR-binding peptide
  MOD_RES (1), (35): Xaa is C or S
  MOD_RES (13), (14), (15), (16), (17): Xaa is A or G
  MOD_RES (18), (19), (20), (21): Xaa is A or G or is absent

SEQ ID NO: 82908 - protein, 40 aa, Artificial Sequence; identical to SEQ ID NO: 51349
  GFR-binding peptide
  MOD_RES (2), (4), (37), (38): Xaa is C or S
  MOD_RES (15), (16), (17), (18), (19): Xaa is A or G
  MOD_RES (20), (21), (22), (23): Xaa is A or G or is absent

SEQ ID NO: 82909 - protein, 38 aa, Artificial Sequence; identical to SEQ ID NO: 18700
  GFR-binding peptide
  MOD_RES (35), (35): Xaa is C or S
  MOD_RES (11), (12), (13), (14), (15): Xaa is A or G
  MOD_RES (16), (17), (18), (19): Xaa is A or G or is absent

SEQ ID NO: 82910 - protein, 40 aa, Artificial Sequence; identical to SEQ ID NO: 17843
  GFR-binding peptide
  MOD_RES (37), (37): Xaa is C or S

SEQ ID NO: 82911 - protein, 40 aa, Artificial Sequence; identical to SEQ ID NO: 18701
  GFR-binding peptide
  MOD_RES (2), (4), (38): Xaa is C or S
  MOD_RES (16), (17), (18), (19), (20): Xaa is A or G
  MOD_RES (21), (22), (23), (24): Xaa is A or G or is absent

SEQ ID NO: 82912 - protein, 38 aa, Artificial Sequence; identical to SEQ ID NO: 18702
  GFR-binding peptide
  MOD_RES (2), (2): Xaa is C or S
  MOD_RES (15), (16), (17), (18), (19): Xaa is A or G
  MOD_RES (20), (21), (22), (23): Xaa is A or G or is absent

SEQ ID NO: 82913 - protein, 42 aa, Artificial Sequence; identical to SEQ ID NO: 18703
  GFR-binding peptide
  MOD_RES (7), (41): Xaa is C or S
  MOD_RES (21), (22), (23), (24), (25): Xaa is A or G
  MOD_RES (26), (27), (28), (29): Xaa is A or G or is absent

SEQ ID NO: 82914 - protein, 34 aa, Artificial Sequence; identical to SEQ ID NO: 19411
  GFR-binding peptide
  MOD_RES (14), (15), (16), (17), (18): Xaa is A or G
  MOD_RES (19), (20), (21), (22): Xaa is A or G or is absent

SEQ ID NO: 82915 - protein, 41 aa, Artificial Sequence; identical to SEQ ID NO: 54943
  GFR-binding peptide
  MOD_RES (6), (7), (38), (40): Xaa is C or S

SEQ ID NO: 82916 - protein, 36 aa, Artificial Sequence; identical to SEQ ID NO: 19412
  GFR-binding peptide
  MOD_RES (16), (17), (18), (19), (20): Xaa is A or G
  MOD_RES (21), (22), (23), (24): Xaa is A or G or is absent

SEQ ID NO: 82917 - protein, 39 aa, Artificial Sequence; identical to SEQ ID NO: 53759
  GFR-binding peptide
  MOD_RES (6), (7), (38): Xaa is C or S

SEQ ID NO: 82918 - protein, 40 aa, Artificial Sequence; identical to SEQ ID NO: 19414
  GFR-binding peptide
  MOD_RES (1), (38), (40): Xaa is C or S
  MOD_RES (17), (18), (19), (20), (21): Xaa is A or G
  MOD_RES (22), (23), (24), (25): Xaa is A or G or is absent

SEQ ID NO: 82919 - protein, 34 aa, Artificial Sequence; identical to SEQ ID NO: 51360
  GFR-binding peptide
  MOD_RES (1), (32), (34): Xaa is C or S

SEQ ID NO: 82920 - protein, 36 aa, Artificial Sequence; identical to SEQ ID NO: 54957
  GFR-binding peptide
  MOD_RES (1), (2), (35): Xaa is C or S
  MOD_RES (16), (17), (18), (19), (20): Xaa is A or G
  MOD_RES (21), (22), (23), (24): Xaa is A or G or is absent

SEQ ID NO: 82921 - protein, 32 aa, Artificial Sequence; identical to SEQ ID NO: 53765
  GFR-binding peptide
  MOD_RES (14), (15), (16), (17), (18): Xaa is A or G
  MOD_RES (19), (20), (21), (22): Xaa is A or G or is absent

SEQ ID NO: 82922 - protein, 36 aa, Artificial Sequence; identical to SEQ ID NO: 51370
  GFR-binding peptide
  MOD_RES (33), (35): Xaa is C or S
  MOD_RES (14), (15), (16), (17), (18): Xaa is A or G
  MOD_RES (19), (20), (21), (22): Xaa is A or G or is absent

SEQ ID NO: 82923 - protein, 41 aa, Artificial Sequence; identical to SEQ ID NO: 54966
  GFR-binding peptide
  MOD_RES (5), (6), (39), (41): Xaa is C or S
  MOD_RES (20), (21), (22), (23), (24): Xaa is A or G
  MOD_RES (25), (26), (27), (28): Xaa is A or G or is absent

SEQ ID NO: 82924 - protein, 39 aa, Artificial Sequence; identical to SEQ ID NO: 18712
  GFR-binding peptide
  MOD_RES (4), (38): Xaa is C or S
  MOD_RES (18), (19), (20), (21), (22): Xaa is A or G
  MOD_RES (23), (24), (25), (26): Xaa is A or G or is absent

SEQ ID NO: 82925 - protein, 41 aa, Artificial Sequence; identical to SEQ ID NO: 19420
  GFR-binding peptide
  MOD_RES (5), (39), (41): Xaa is C or S

SEQ ID NO: 82926 - protein, 36 aa, Artificial Sequence; identical to SEQ ID NO: 19421
  GFR-binding peptide
  MOD_RES (1), (35): Xaa is C or S
  MOD_RES (15), (16), (17), (18), (19): Xaa is A or G
  MOD_RES (20), (21), (22), (23): Xaa is A or G or is absent

SEQ ID NO: 82927 - protein, 36 aa, Artificial Sequence; identical to SEQ ID NO: 51377
  GFR-binding peptide
  MOD_RES (3), (4), (35): Xaa is C or S

SEQ ID NO: 82928 - protein, 32 aa, Artificial Sequence; identical to SEQ ID NO: 19422
  GFR-binding peptide

SEQ ID NO: 82929 - protein, 32 aa, Artificial Sequence; identical to SEQ ID NO: 18713
  GFR-binding peptide

SEQ ID NO: 82930 - protein, 42 aa, Artificial Sequence; identical to SEQ ID NO: 18714
  GFR-binding peptide
  MOD_RES (5), (42): Xaa is C or S

SEQ ID NO: 82931 - protein, 40 aa, Artificial Sequence; identical to SEQ ID NO: 52600
  GFR-binding peptide
  MOD_RES (5), (6), (37), (39): Xaa is C or S

SEQ ID NO: 82932 - protein, 34 aa, Artificial Sequence; identical to SEQ ID NO: 18715
  GFR-binding peptide
  MOD_RES (2), (2): Xaa is C or S
  MOD_RES (16), (17), (18), (19), (20): Xaa is A or G
  MOD_RES (21), (22), (23), (24): Xaa is A or G or is absent

SEQ ID NO: 82933 - protein, 35 aa, Artificial Sequence; identical to SEQ ID NO: 18716
  GFR-binding peptide
  MOD_RES (1), (1): Xaa is C or S
  MOD_RES (17), (18), (19), (20), (21): Xaa is A or G
  MOD_RES (22), (23), (24), (25): Xaa is A or G or is absent

SEQ ID NO: 82934 - protein, 43 aa, Artificial Sequence; identical to SEQ ID NO: 18718
  GFR-binding peptide
  MOD_RES (7), (41), (43): Xaa is C or S
  MOD_RES (21), (22), (23), (24), (25): Xaa is A or G
  MOD_RES (26), (27), (28), (29): Xaa is A or G or is absent

SEQ ID NO: 82935 - protein, 33 aa, Artificial Sequence; identical to SEQ ID NO: 19425
  GFR-binding peptide
  MOD_RES (14), (15), (16), (17), (18): Xaa is A or G
  MOD_RES (19), (20), (21), (22): Xaa is A or G or is absent

SEQ ID NO: 82936 - protein, 40 aa, Artificial Sequence; identical to SEQ ID NO: 19427
  GFR-binding peptide
  MOD_RES (1), (38), (40): Xaa is C or S
  MOD_RES (17), (18), (19), (20), (21): Xaa is A or G
  MOD_RES (22), (23), (24), (25): Xaa is A or G or is absent

SEQ ID NO: 82937 - protein, 40 aa, Artificial Sequence; identical to SEQ ID NO: 18719
  GFR-binding peptide
  MOD_RES (7), (7): Xaa is C or S
  MOD_RES (21), (22), (23), (24), (25): Xaa is A or G
  MOD_RES (26), (27), (28), (29): Xaa is A or G or is absent

SEQ ID NO: 82938 - protein, 38 aa, Artificial Sequence; identical to SEQ ID NO: 18720
  GFR-binding peptide
  MOD_RES (2), (2): Xaa is C or S
  MOD_RES (18), (19), (20), (21), (22): Xaa is A or G
  MOD_RES (23), (24), (25), (26): Xaa is A or G or is absent

SEQ ID NO: 82939 - protein, 30 aa, Artificial Sequence; identical to SEQ ID NO: 51389
  GFR-binding peptide

SEQ ID NO: 82940 - protein, 41 aa, Artificial Sequence; identical to SEQ ID NO: 18721
  GFR-binding peptide
  MOD_RES (4), (38), (40): Xaa is C or S
  MOD_RES (18), (19), (20), (21), (22): Xaa is A or G
  MOD_RES (23), (24), (25), (26): Xaa is A or G or is absent

SEQ ID NO: 82941 - protein, 36 aa, Artificial Sequence; identical to SEQ ID NO: 18722
  GFR-binding peptide
  MOD_RES (1), (35): Xaa is C or S
  MOD_RES (15), (16), (17), (18), (19): Xaa is A or G
  MOD_RES (20), (21), (22), (23): Xaa is A or G or is absent

SEQ ID NO: 82942 - protein, 40 aa, Artificial Sequence; identical to SEQ ID NO: 53796
  GFR-binding peptide
  MOD_RES (3), (4), (37), (39): Xaa is C or S
  MOD_RES (18), (19), (20), (21), (22): Xaa is A or G
  MOD_RES (23), (24), (25), (26): Xaa is A or G or is absent

SEQ ID NO: 82943 - protein, 43 aa, Artificial Sequence; identical to SEQ ID NO: 19429
  GFR-binding peptide
  MOD_RES (6), (40), (42): Xaa is C or S

SEQ ID NO: 82944 - protein, 33 aa, Artificial Sequence; identical to SEQ ID NO: 51395
  GFR-binding peptide
  MOD_RES (1), (2), (33): Xaa is C or S

SEQ ID NO: 82945 - protein, 35 aa, Artificial Sequence; identical to SEQ ID NO: 53799
  GFR-binding peptide
  MOD_RES (1), (32), (34): Xaa is C or S

SEQ ID NO: 82946 - protein, 36 aa, Artificial Sequence; identical to SEQ ID NO: 54988
  GFR-binding peptide
  MOD_RES (33), (35): Xaa is C or S
  MOD_RES (14), (15), (16), (17), (18): Xaa is A or G
  MOD_RES (19), (20), (21), (22): Xaa is A or G or is absent

SEQ ID NO: 82947 - protein, 40 aa, Artificial Sequence; identical to SEQ ID NO: 19433
  GFR-binding peptide
  MOD_RES (5), (5): Xaa is C or S

SEQ ID NO: 82948 - protein, 36 aa, Artificial Sequence; identical to SEQ ID NO: 18727
  GFR-binding peptide
  MOD_RES (34), (36): Xaa is C or S

SEQ ID NO: 82949 - protein, 38 aa, Artificial Sequence; identical to SEQ ID NO: 19434
  GFR-binding peptide
  MOD_RES (1), (35), (37): Xaa is C or S
  MOD_RES (15), (16), (17), (18), (19): Xaa is A or G
  MOD_RES (20), (21), (22), (23): Xaa is A or G or is absent

SEQ ID NO: 82950 - protein, 39 aa, Artificial Sequence; identical to SEQ ID NO: 51398
  GFR-binding peptide
  MOD_RES (6), (7), (38): Xaa is C or S

SEQ ID NO: 82951 - protein, 34 aa, Artificial Sequence; identical to SEQ ID NO: 54992
  GFR-binding peptide
  MOD_RES (1), (2), (33): Xaa is C or S

SEQ ID NO: 82952 - protein, 35 aa, Artificial Sequence; identical to SEQ ID NO: 19435
  GFR-binding peptide

SEQ ID NO: 82953 - protein, 40 aa, Artificial Sequence; identical to SEQ ID NO: 18728
  GFR-binding peptide
  MOD_RES (2), (39): Xaa is C or S
  MOD_RES (18), (19), (20), (21), (22): Xaa is A or G
  MOD_RES (23), (24), (25), (26): Xaa is A or G or is absent

SEQ ID NO: 82954 - protein, 37 aa, Artificial Sequence; identical to SEQ ID NO: 18729
  GFR-binding peptide
  MOD_RES (4), (4): Xaa is C or S
  MOD_RES (18), (19), (20), (21), (22): Xaa is A or G
  MOD_RES (23), (24), (25), (26): Xaa is A or G or is absent

SEQ ID NO: 82955 - protein, 36 aa, Artificial Sequence; identical to SEQ ID NO: 19436
  GFR-binding peptide
  MOD_RES (2), (2): Xaa is C or S

SEQ ID NO: 82956 - protein, 38 aa, Artificial Sequence; identical to SEQ ID NO: 19437
  GFR-binding peptide
  MOD_RES (1), (35), (37): Xaa is C or S
  MOD_RES (15), (16), (17), (18), (19): Xaa is A or G
  MOD_RES (20), (21), (22), (23): Xaa is A or G or is absent

SEQ ID NO: 82957 - protein, 35 aa, Artificial Sequence; identical to SEQ ID NO: 54996
  GFR-binding peptide
  MOD_RES (3), (4), (35): Xaa is C or S

SEQ ID NO: 82958 - protein, 37 aa, Artificial Sequence; identical to SEQ ID NO: 18730
  GFR-binding peptide
  MOD_RES (2), (2): Xaa is C or S
  MOD_RES (18), (19), (20), (21), (22): Xaa is A or G
  MOD_RES (23), (24), (25), (26): Xaa is A or G or is absent

SEQ ID NO: 82959 - protein, 40 aa, Artificial Sequence; identical to SEQ ID NO: 18731
  GFR-binding peptide
  MOD_RES (37), (39): Xaa is C or S
  MOD_RES (16), (17), (18), (19), (20): Xaa is A or G
  MOD_RES (21), (22), (23), (24): Xaa is A or G or is absent

SEQ ID NO: 82960 - protein, 37 aa, Artificial Sequence; identical to SEQ ID NO: 18732
  GFR-binding peptide
  MOD_RES (1), (1): Xaa is C or S

SEQ ID NO: 82961 - protein, 39 aa, Artificial Sequence; identical to SEQ ID NO: 52628
  GFR-binding peptide
  MOD_RES (3), (4), (37), (39): Xaa is C or S
  MOD_RES (18), (19), (20), (21), (22): Xaa is A or G
  MOD_RES (23), (24), (25), (26): Xaa is A or G or is absent

SEQ ID NO: 82962 - protein, 33 aa, Artificial Sequence; identical to SEQ ID NO: 55001
  GFR-binding peptide
  MOD_RES (1), (2), (33): Xaa is C or S

SEQ ID NO: 82963 - protein, 36 aa, Artificial Sequence; identical to SEQ ID NO: 18734
  GFR-binding peptide
  MOD_RES (35), (35): Xaa is C or S
  MOD_RES (14), (15), (16), (17), (18): Xaa is A or G
  MOD_RES (19), (20), (21), (22): Xaa is A or G or is absent

SEQ ID NO: 82964 - protein, 37 aa, Artificial Sequence; identical to SEQ ID NO: 19444
  GFR-binding peptide
  MOD_RES (35), (37): Xaa is C or S

SEQ ID NO: 82965 - protein, 39 aa, Artificial Sequence; identical to SEQ ID NO: 19446
  GFR-binding peptide
  MOD_RES (1), (38): Xaa is C or S
  MOD_RES (17), (18), (19), (20), (21): Xaa is A or G
  MOD_RES (22), (23), (24), (25): Xaa is A or G or is absent

SEQ ID NO: 82966 - protein, 37 aa, Artificial Sequence; identical to SEQ ID NO: 19447
  GFR-binding peptide
  MOD_RES (36), (36): Xaa is C or S
  MOD_RES (15), (16), (17), (18), (19): Xaa is A or G
  MOD_RES (20), (21), (22), (23): Xaa is A or G or is absent

SEQ ID NO: 82967 - protein, 34 aa, Artificial Sequence; identical to SEQ ID NO: 18737
  GFR-binding peptide

SEQ ID NO: 82968 - protein, 39 aa, Artificial Sequence; identical to SEQ ID NO: 19448
  GFR-binding peptide
  MOD_RES (2), (39): Xaa is C or S

SEQ ID NO: 82969 - protein, 37 aa, Artificial Sequence; identical to SEQ ID NO: 18738
  GFR-binding peptide
  MOD_RES (34), (36): Xaa is C or S

SEQ ID NO: 82970 - protein, 37 aa, Artificial Sequence; identical to SEQ ID NO: 19450
  GFR-binding peptide
  MOD_RES (35), (37): Xaa is C or S

SEQ ID NO: 82971 - protein, 38 aa, Artificial Sequence; identical to SEQ ID NO: 51421
  GFR-binding peptide
  MOD_RES (3), (4), (37): Xaa is C or S
  MOD_RES (18), (19), (20), (21), (22): Xaa is A or G
  MOD_RES (23), (24), (25), (26): Xaa is A or G or is absent

SEQ ID NO: 82972 - protein, 34 aa, Artificial Sequence; identical to SEQ ID NO: 55012
  GFR-binding peptide
  MOD_RES (1), (32), (34): Xaa is C or S

SEQ ID NO: 82973 - protein, 37 aa, Artificial Sequence; identical to SEQ ID NO: 18740
  GFR-binding peptide
  MOD_RES (37), (37): Xaa is C or S
  MOD_RES (16), (17), (18), (19), (20): Xaa is A or G
  MOD_RES (21), (22), (23), (24): Xaa is A or G or is absent

SEQ ID NO: 82974 - protein, 43 aa, Artificial Sequence; identical to SEQ ID NO: 19451
  GFR-binding peptide
  MOD_RES (6), (40), (42): Xaa is C or S

SEQ ID NO: 82975 - protein, 37 aa, Artificial Sequence; identical to SEQ ID NO: 53826
  GFR-binding peptide
  MOD_RES (1), (2), (35), (37): Xaa is C or S
  MOD_RES (16), (17), (18), (19), (20): Xaa is A or G
  MOD_RES (21), (22), (23), (24): Xaa is A or G or is absent

SEQ ID NO: 82976 - protein, 32 aa, Artificial Sequence; identical to SEQ ID NO: 55014
  GFR-binding peptide
  MOD_RES (1), (32): Xaa is C or S

SEQ ID NO: 82977 - protein, 33 aa, Artificial Sequence; identical to SEQ ID NO: 19453
  GFR-binding peptide
  MOD_RES (14), (15), (16), (17), (18): Xaa is A or G
  MOD_RES (19), (20), (21), (22): Xaa is A or G or is absent

SEQ ID NO: 82978 - protein, 42 aa, Artificial Sequence; identical to SEQ ID NO: 19455
  GFR-binding peptide
  MOD_RES (5), (42): Xaa is C or S
  MOD_RES (21), (22), (23), (24), (25): Xaa is A or G
  MOD_RES (26), (27), (28), (29): Xaa is A or G or is absent

SEQ ID NO: 82979 - protein, 36 aa, Artificial Sequence; identical to SEQ ID NO: 55017
  GFR-binding peptide
  MOD_RES (1), (2), (35): Xaa is C or S
  MOD_RES (16), (17), (18), (19), (20): Xaa is A or G
  MOD_RES (21), (22), (23), (24): Xaa is A or G or is absent

SEQ ID NO: 82980 - protein, 33 aa, Artificial Sequence; identical to SEQ ID NO: 51424
  GFR-binding peptide
  MOD_RES (31), (33): Xaa is C or S

SEQ ID NO: 82981 - protein, 39 aa, Artificial Sequence; identical to SEQ ID NO: 19456
  GFR-binding peptide
  MOD_RES (7), (7): Xaa is C or S
  MOD_RES (21), (22), (23), (24), (25): Xaa is A or G
  MOD_RES (26), (27), (28), (29): Xaa is A or G or is absent

SEQ ID NO: 82982 - protein, 40 aa, Artificial Sequence; identical to SEQ ID NO: 18744
  GFR-binding peptide
  MOD_RES (4), (38), (40): Xaa is C or S
  MOD_RES (18), (19), (20), (21), (22): Xaa is A or G
  MOD_RES (23), (24), (25), (26): Xaa is A or G or is absent

SEQ ID NO: 82983 - protein, 36 aa, Artificial Sequence; identical to SEQ ID NO: 53834
  GFR-binding peptide
  MOD_RES (3), (4), (35): Xaa is C or S

SEQ ID NO: 82984 - protein, 33 aa, Artificial Sequence; identical to SEQ ID NO: 55019
  GFR-binding peptide
  MOD_RES (31), (33): Xaa is C or S

SEQ ID NO: 82985 - protein, 38 aa, Artificial Sequence; identical to SEQ ID NO: 19457
  GFR-binding peptide
  MOD_RES (1), (38): Xaa is C or S

SEQ ID NO: 82986 - protein, 41 aa, Artificial Sequence; identical to SEQ ID NO: 18747
  GFR-binding peptide
  MOD_RES (7), (41): Xaa is C or S
  MOD_RES (21), (22), (23), (24), (25): Xaa is A or G
  MOD_RES (26), (27), (28), (29): Xaa is A or G or is absent

SEQ ID NO: 82987 - protein, 35 aa, Artificial Sequence; identical to SEQ ID NO: 51434
  GFR-binding peptide
  MOD_RES (1), (2), (33), (35): Xaa is C or S

SEQ ID NO: 82988 - protein, 35 aa, Artificial Sequence; identical to SEQ ID NO: 52645
  GFR-binding peptide
  MOD_RES (1), (2), (33), (35): Xaa is C or S

SEQ ID NO: 82989 - protein, 36 aa, Artificial Sequence; identical to SEQ ID NO: 18749
  GFR-binding peptide
  MOD_RES (4), (4): Xaa is C or S
  MOD_RES (18), (19), (20), (21), (22): Xaa is A or G
  MOD_RES (23), (24), (25), (26): Xaa is A or G or is absent

SEQ ID NO: 82990 - protein, 38 aa, Artificial Sequence; identical to SEQ ID NO: 18750
  GFR-binding peptide
  MOD_RES (3), (37): Xaa is C or S

SEQ ID NO: 82991 - protein, 38 aa, Artificial Sequence; identical to SEQ ID NO: 18751
  GFR-binding peptide
  MOD_RES (37), (37): Xaa is C or S

SEQ ID NO: 82992 - protein, 32 aa, Artificial Sequence; identical to SEQ ID NO: 19459
  GFR-binding peptide
  MOD_RES (14), (15), (16), (17), (18): Xaa is A or G
  MOD_RES (19), (20), (21), (22): Xaa is A or G or is absent

SEQ ID NO: 82993 - protein, 39 aa, Artificial Sequence; identical to SEQ ID NO: 18754
  GFR-binding peptide
  MOD_RES (5), (5): Xaa is C or S
  MOD_RES (21), (22), (23), (24), (25): Xaa is A or G
  MOD_RES (26), (27), (28), (29): Xaa is A or G or is absent

SEQ ID NO: 82994 - protein, 38 aa, Artificial Sequence; identical to SEQ ID NO: 19461
  GFR-binding peptide
  MOD_RES (3), (3): Xaa is C or S

SEQ ID NO: 82995 - protein, 42 aa, Artificial Sequence; identical to SEQ ID NO: 52649
  GFR-binding peptide
  MOD_RES (5), (6), (39), (41): Xaa is C or S
  MOD_RES (20), (21), (22), (23), (24): Xaa is A or G
  MOD_RES (25), (26), (27), (28): Xaa is A or G or is absent

SEQ ID NO: 82996 - protein, 38 aa, Artificial Sequence; identical to SEQ ID NO: 55032
  GFR-binding peptide
  MOD_RES (3), (4), (35), (37): Xaa is C or S

SEQ ID NO: 82997 - protein, 44 aa, Artificial Sequence; identical to SEQ ID NO: 19466
  GFR-binding peptide
  MOD_RES (4), (41), (43): Xaa is C or S
  MOD_RES (20), (21), (22), (23), (24): Xaa is A or G
  MOD_RES (25), (26), (27), (28): Xaa is A or G or is absent

SEQ ID NO: 82998 - protein, 39 aa, Artificial Sequence; identical to SEQ ID NO: 19467
  GFR-binding peptide
  MOD_RES (5), (5): Xaa is C or S
  MOD_RES (21), (22), (23), (24), (25): Xaa is A or G
  MOD_RES (26), (27), (28), (29): Xaa is A or G or is absent

SEQ ID NO: 82999 - protein, 43 aa, Artificial Sequence; identical to SEQ ID NO: 18756
  GFR-binding peptide
  MOD_RES (5), (42): Xaa is C or S
  MOD_RES (21), (22), (23), (24), (25): Xaa is A or G
  MOD_RES (26), (27), (28), (29): Xaa is A or G or is absent

SEQ ID NO: 83000 - protein, 40 aa, Artificial Sequence; identical to SEQ ID NO: 19468
  GFR-binding peptide
  MOD_RES (7), (7): Xaa is C or S
  MOD_RES (21), (22), (23), (24), (25): Xaa is A or G
  MOD_RES (26), (27), (28), (29): Xaa is A or G or is absent

SEQ ID NO: 83001 - protein, 42 aa, Artificial Sequence; identical to SEQ ID NO: 18757
  GFR-binding peptide
  MOD_RES (6), (40), (42): Xaa is C or S

SEQ ID NO: 83002 - protein, 34 aa, Artificial Sequence; identical to SEQ ID NO: 19469
  GFR-binding peptide
  MOD_RES (15), (16), (17), (18), (19): Xaa is A or G
  MOD_RES (20), (21), (22), (23): Xaa is A or G or is absent

SEQ ID NO: 83003 - protein, 39 aa, Artificial Sequence; identical to SEQ ID NO: 19470
  GFR-binding peptide
  MOD_RES (7), (7): Xaa is C or S

SEQ ID NO: 83004 - protein, 35 aa, Artificial Sequence; identical to SEQ ID NO: 18759
  GFR-binding peptide
  MOD_RES (15), (16), (17), (18), (19): Xaa is A or G
  MOD_RES (20), (21), (22), (23): Xaa is A or G or is absent

SEQ ID NO: 83005 - protein, 35 aa, Artificial Sequence; identical to SEQ ID NO: 52661
  GFR-binding peptide
  MOD_RES (2), (3): Xaa is C or S
  MOD_RES (17), (18), (19), (20), (21): Xaa is A or G
  MOD_RES (22), (23), (24), (25): Xaa is A or G or is absent

SEQ ID NO: 83006 - protein, 42 aa, Artificial Sequence; identical to SEQ ID NO: 19471
  GFR-binding peptide
  MOD_RES (4), (41): Xaa is C or S
  MOD_RES (20), (21), (22), (23), (24): Xaa is A or G
  MOD_RES (25), (26), (27), (28): Xaa is A or G or is absent

SEQ ID NO: 83007 - protein, 35 aa, Artificial Sequence; identical to SEQ ID NO: 51452
  GFR-binding peptide
  MOD_RES (1), (34): Xaa is C or S
  MOD_RES (15), (16), (17), (18), (19): Xaa is A or G
  MOD_RES (20), (21), (22), (23): Xaa is A or G or is absent

SEQ ID NO: 83008 - protein, 37 aa, Artificial Sequence; identical to SEQ ID NO: 53863
  GFR-binding peptide
  MOD_RES (5), (6), (37): Xaa is C or S

SEQ ID NO: 83009 - protein, 38 aa, Artificial Sequence; identical to SEQ ID NO: 18760
  GFR-binding peptide
  MOD_RES (4), (4): Xaa is C or S

SEQ ID NO: 83010 - protein, 37 aa, Artificial Sequence; identical to SEQ ID NO: 18761
  GFR-binding peptide
  MOD_RES (5), (5): Xaa is C or S

SEQ ID NO: 83011 - protein, 38 aa, Artificial Sequence; identical to SEQ ID NO: 18762
  GFR-binding peptide
  MOD_RES (1), (35), (37): Xaa is C or S

SEQ ID NO: 83012 - protein, 32 aa, Artificial Sequence; identical to SEQ ID NO: 53869
  GFR-binding peptide
  MOD_RES (1), (32): Xaa is C or S

SEQ ID NO: 83013 - protein, 37 aa, Artificial Sequence; identical to SEQ ID NO: 55044
  GFR-binding peptide
  MOD_RES (2), (3), (34), (36): Xaa is C or S

SEQ ID NO: 83014 - protein, 40 aa, Artificial Sequence; identical to SEQ ID NO: 19473
  GFR-binding peptide
  MOD_RES (5), (39): Xaa is C or S

SEQ ID NO: 83015 - protein, 39 aa, Artificial Sequence; identical to SEQ ID NO: 19474
  GFR-binding peptide
  MOD_RES (3), (37), (39): Xaa is C or S

SEQ ID NO: 83016 - protein, 37 aa, Artificial Sequence; identical to SEQ ID NO: 19475
  GFR-binding peptide
  MOD_RES (36), (36): Xaa is C or S
  MOD_RES (15), (16), (17), (18), (19): Xaa is A or G
  MOD_RES (20), (21), (22), (23): Xaa is A or G or is absent

SEQ ID NO: 83017 - protein, 35 aa, Artificial Sequence; identical to SEQ ID NO: 18765
  GFR-binding peptide
  MOD_RES (1), (1): Xaa is C or S

SEQ ID NO: 83018 - protein, 34 aa, Artificial Sequence; identical to SEQ ID NO: 52671
  GFR-binding peptide
  MOD_RES (1), (2), (33): Xaa is C or S

SEQ ID NO: 83019 - protein, 41 aa, Artificial Sequence; identical to SEQ ID NO: 19478
  GFR-binding peptide
  MOD_RES (1), (38), (40): Xaa is C or S
  MOD_RES (17), (18), (19), (20), (21): Xaa is A or G
  MOD_RES (22), (23), (24), (25): Xaa is A or G or is absent

SEQ ID NO: 83020 - protein, 38 aa, Artificial Sequence; identical to SEQ ID NO: 19479
  GFR-binding peptide
  MOD_RES (37), (37): Xaa is C or S
  MOD_RES (16), (17), (18), (19), (20): Xaa is A or G
  MOD_RES (21), (22), (23), (24): Xaa is A or G or is absent

SEQ ID NO: 83021 - protein, 38 aa, Artificial Sequence; identical to SEQ ID NO: 19480
  GFR-binding peptide
  MOD_RES (36), (38): Xaa is C or S
  MOD_RES (15), (16), (17), (18), (19): Xaa is A or G
  MOD_RES (20), (21), (22), (23): Xaa is A or G or is absent

SEQ ID NO: 83022 - protein, 35 aa, Artificial Sequence; identical to SEQ ID NO: 18767
  GFR-binding peptide
  MOD_RES (3), (3): Xaa is C or S

SEQ ID NO: 83023 - protein, 40 aa, Artificial Sequence; identical to SEQ ID NO: 18768
  GFR-binding peptide
  MOD_RES (4), (4): Xaa is C or S
  MOD_RES (20), (21), (22), (23), (24): Xaa is A or G
  MOD_RES (25), (26), (27), (28): Xaa is A or G or is absent

SEQ ID NO: 83024 - protein, 41 aa, Artificial Sequence; identical to SEQ ID NO: 19481
  GFR-binding peptide
  MOD_RES (4), (41): Xaa is C or S
  MOD_RES (20), (21), (22), (23), (24): Xaa is A or G
  MOD_RES (25), (26), (27), (28): Xaa is A or G or is absent

SEQ ID NO: 83025 - protein, 37 aa, Artificial Sequence; identical to SEQ ID NO: 19482
  GFR-binding peptide
  MOD_RES (4), (4): Xaa is C or S
  MOD_RES (18), (19), (20), (21), (22): Xaa is A or G
  MOD_RES (23), (24), (25), (26): Xaa is A or G or is absent

SEQ ID NO: 83026 - protein, 38 aa, Artificial Sequence; identical to SEQ ID NO: 18771
  GFR-binding peptide
  MOD_RES (1), (35), (37): Xaa is C or S

SEQ ID NO: 83027 - protein, 38 aa, Artificial Sequence; identical to SEQ ID NO: 51462
  GFR-binding peptide
  MOD_RES (6), (7), (38): Xaa is C or S

SEQ ID NO: 83028 - protein, 36 aa, Artificial Sequence; identical to SEQ ID NO: 55053
  GFR-binding peptide
  MOD_RES (4), (5), (36): Xaa is C or S

SEQ ID NO: 83029 - protein, 39 aa, Artificial Sequence; identical to SEQ ID NO: 19485
  GFR-binding peptide
  MOD_RES (3), (37), (39): Xaa is C or S

SEQ ID NO: 83030 - protein, 38 aa, Artificial Sequence; identical to SEQ ID NO: 19486
  GFR-binding peptide
  MOD_RES (6), (6): Xaa is C or S

SEQ ID NO: 83031 - protein, 41 aa, Artificial Sequence; identical to SEQ ID NO: 19489
  GFR-binding peptide
  MOD_RES (6), (40): Xaa is C or S

SEQ ID NO: 83032 - protein, 36 aa, Artificial Sequence; identical to SEQ ID NO: 55057
  GFR-binding peptide
  MOD_RES (2), (3), (36): Xaa is C or S
  MOD_RES (17), (18), (19), (20), (21): Xaa is A or G
  MOD_RES (22), (23), (24), (25): Xaa is A or G or is absent

SEQ ID NO: 83033 - protein, 34 aa, Artificial Sequence; identical to SEQ ID NO: 19490
  GFR-binding peptide
  MOD_RES (16), (17), (18), (19), (20): Xaa is A or G
  MOD_RES (21), (22), (23), (24): Xaa is A or G or is absent

SEQ ID NO: 83034 - protein, 42 aa, Artificial Sequence; identical to SEQ ID NO: 18774
  GFR-binding peptide
  MOD_RES (5), (39), (41): Xaa is C or S
  MOD_RES (19), (20), (21), (22), (23): Xaa is A or G
  MOD_RES (24), (25), (26), (27): Xaa is A or G or is absent

SEQ ID NO: 83035 - protein, 41 aa, Artificial Sequence; identical to SEQ ID NO: 19491
  GFR-binding peptide
  MOD_RES (1), (38), (40): Xaa is C or S
  MOD_RES (17), (18), (19), (20), (21): Xaa is A or G
  MOD_RES (22), (23), (24), (25): Xaa is A or G or is absent

SEQ ID NO: 83036 - protein, 36 aa, Artificial Sequence; identical to SEQ ID NO: 19492
  GFR-binding peptide
  MOD_RES (34), (36): Xaa is C or S

SEQ ID NO: 83037 - protein, 40 aa, Artificial Sequence; identical to SEQ ID NO: 19494
  GFR-binding peptide
  MOD_RES (3), (40): Xaa is C or S
  MOD_RES (19), (20), (21), (22), (23): Xaa is A or G
  MOD_RES (24), (25), (26), (27): Xaa is A or G or is absent

SEQ ID NO: 83038 - protein, 40 aa, Artificial Sequence; identical to SEQ ID NO: 51470
  GFR-binding peptide
  MOD_RES (6), (7), (38), (40): Xaa is C or S

SEQ ID NO: 83039 - protein, 41 aa, Artificial Sequence; identical to SEQ ID NO: 18779
  GFR-binding peptide
  MOD_RES (4), (38), (40): Xaa is C or S
  MOD_RES (18), (19), (20), (21), (22): Xaa is A or G
  MOD_RES (23), (24), (25), (26): Xaa is A or G or is absent

SEQ ID NO: 83040 - protein, 34 aa, Artificial Sequence; identical to SEQ ID NO: 55063
  GFR-binding peptide
  MOD_RES (1), (32), (34): Xaa is C or S

SEQ ID NO: 83041 - protein, 36 aa, Artificial Sequence; identical to SEQ ID NO: 55067
  GFR-binding peptide
  MOD_RES (33), (35): Xaa is C or S
  MOD_RES (14), (15), (16), (17), (18): Xaa is A or G
  MOD_RES (19), (20), (21), (22): Xaa is A or G or is absent

SEQ ID NO: 83042 - protein, 35 aa, Artificial Sequence; identical to SEQ ID NO: 18780
  GFR-binding peptide
  MOD_RES (2), (2): Xaa is C or S
  MOD_RES (16), (17), (18), (19), (20): Xaa is A or G
  MOD_RES (21), (22), (23), (24): Xaa is A or G or is absent

SEQ ID NO: 83043 - protein, 39 aa, Artificial Sequence; identical to SEQ ID NO: 19495
  GFR-binding peptide
  MOD_RES (4), (4): Xaa is C or S
  MOD_RES (20), (21), (22), (23), (24): Xaa is A or G
  MOD_RES (25), (26), (27), (28): Xaa is A or G or is absent

SEQ ID NO: 83044 - protein, 41 aa, Artificial Sequence; identical to SEQ ID NO: 53897
  GFR-binding peptide
  MOD_RES (4), (5), (38), (40): Xaa is C or S
  MOD_RES (19), (20), (21), (22), (23): Xaa is A or G
  MOD_RES (24), (25), (26), (27): Xaa is A or G or is absent

SEQ ID NO: 83045 - protein, 32 aa, Artificial Sequence; identical to SEQ ID NO: 19496
  GFR-binding peptide
  MOD_RES (14), (15), (16), (17), (18): Xaa is A or G
  MOD_RES (19), (20), (21), (22): Xaa is A or G or is absent

SEQ ID NO: 83046 - protein, 36 aa, Artificial Sequence; identical to SEQ ID NO: 51473
  GFR-binding peptide
  MOD_RES (1), (2), (35): Xaa is C or S
  MOD_RES (16), (17), (18), (19), (20): Xaa is A or G
  MOD_RES (21), (22), (23), (24): Xaa is A or G or is absent

SEQ ID NO: 83047 - protein, 33 aa, Artificial Sequence; identical to SEQ ID NO: 18784
  GFR-binding peptide

SEQ ID NO: 83048 - protein, 37 aa, Artificial Sequence; identical to SEQ ID NO: 52706
  GFR-binding peptide
  MOD_RES (4), (5): Xaa is C or S
  MOD_RES (19), (20), (21), (22), (23): Xaa is A or G
  MOD_RES (24), (25), (26), (27): Xaa is A or G or is absent

SEQ ID NO: 83049 - protein, 40 aa, Artificial Sequence; identical to SEQ ID NO: 19498
  GFR-binding peptide
  MOD_RES (4), (4): Xaa is C or S
  MOD_RES (20), (21), (22), (23), (24): Xaa is A or G
  MOD_RES (25), (26), (27), (28): Xaa is A or G or is absent

SEQ ID NO: 83050 - protein, 39 aa, Artificial Sequence; identical to SEQ ID NO: 51477
  GFR-binding peptide
  MOD_RES (4), (5), (36), (38): Xaa is C or S

SEQ ID NO: 83051 - protein, 40 aa, Artificial Sequence; identical to SEQ ID NO: 19499
  GFR-binding peptide
  MOD_RES (4), (38), (40): Xaa is C or S
  MOD_RES (18), (19), (20), (21), (22): Xaa is A or G
  MOD_RES (23), (24), (25), (26): Xaa is A or G or is absent

SEQ ID NO: 83052 - protein, 35 aa, Artificial Sequence; identical to SEQ ID NO: 52709
  GFR-binding peptide
  MOD_RES (1), (2), (33), (35): Xaa is C or S

SEQ ID NO: 83053 - protein, 42 aa, Artificial Sequence; identical to SEQ ID NO: 19501
  GFR-binding peptide
  MOD_RES (4), (41): Xaa is C or S

SEQ ID NO: 83054 - protein, 40 aa, Artificial Sequence; identical to SEQ ID NO: 19502
  GFR-binding peptide
  MOD_RES (5), (39): Xaa is C or S

SEQ ID NO: 83055 - protein, 34 aa, Artificial Sequence; identical to SEQ ID NO: 52710
  GFR-binding peptide
  MOD_RES (3), (4): Xaa is C or S

SEQ ID NO: 83056 - protein, 36 aa, Artificial Sequence; identical to SEQ ID NO: 18785
  GFR-binding peptide
  MOD_RES (3), (3): Xaa is C or S
  MOD_RES (17), (18), (19), (20), (21): Xaa is A or G
  MOD_RES (22), (23), (24), (25): Xaa is A or G or is absent

SEQ ID NO: 83057 - protein, 39 aa, Artificial Sequence; identical to SEQ ID NO: 52711
  GFR-binding peptide
  MOD_RES (3), (4), (37), (39): Xaa is C or S
  MOD_RES (18), (19), (20), (21), (22): Xaa is A or G
  MOD_RES (23), (24), (25), (26): Xaa is A or G or is absent

SEQ ID NO: 83058 - protein, 36 aa, Artificial Sequence; identical to SEQ ID NO: 55081
  GFR-binding peptide
  MOD_RES (3), (4), (35): Xaa is C or S

SEQ ID NO: 83059 - protein, 37 aa, Artificial Sequence; identical to SEQ ID NO: 53900
  GFR-binding peptide
  MOD_RES (2), (3), (34), (36): Xaa is C or S

SEQ ID NO: 83060 - protein, 35 aa, Artificial Sequence; identical to SEQ ID NO: 18787
  GFR-binding peptide

SEQ ID NO: 83061 - protein, 39 aa, Artificial Sequence; identical to SEQ ID NO: 18788
  GFR-binding peptide
  MOD_RES (3), (37), (39): Xaa is C or S

SEQ ID NO: 83062 - protein, 38 aa, Artificial Sequence; identical to SEQ ID NO: 52714
  GFR-binding peptide
  MOD_RES (4), (5), (38): Xaa is C or S
  MOD_RES (19), (20), (21), (22), (23): Xaa is A or G
  MOD_RES (24), (25), (26), (27): Xaa is A or G or is absent

SEQ ID NO: 83063 - protein, 42 aa, Artificial Sequence; identical to SEQ ID NO: 19504
  GFR-binding peptide
  MOD_RES (2), (39), (41): Xaa is C or S

SEQ ID NO: 83064 - protein, 41 aa, Artificial Sequence; identical to SEQ ID NO: 18789
  GFR-binding peptide
  MOD_RES (5), (5): Xaa is C or S

SEQ ID NO: 83065 - protein, 35 aa, Artificial Sequence; identical to SEQ ID NO: 18790
  GFR-binding peptide
  MOD_RES (34), (34): Xaa is C or S

SEQ ID NO: 83066 - protein, 34 aa, Artificial Sequence; identical to SEQ ID NO: 19506
  GFR-binding peptide
  MOD_RES (1), (1): Xaa is C or S

SEQ ID NO: 83067 - protein, 39 aa, Artificial Sequence; identical to SEQ ID NO: 19507
  GFR-binding peptide
  MOD_RES (36), (38): Xaa is C or S
  MOD_RES (15), (16), (17), (18), (19): Xaa is A or G
  MOD_RES (20), (21), (22), (23): Xaa is A or G or is absent

SEQ ID NO: 83068 - protein, 37 aa, Artificial Sequence; identical to SEQ ID NO: 18791
  GFR-binding peptide
  MOD_RES (2), (36): Xaa is C or S
  MOD_RES (16), (17), (18), (19), (20): Xaa is A or G
  MOD_RES (21), (22), (23), (24): Xaa is A or G or is absent

SEQ ID NO: 83069 - protein, 38 aa, Artificial Sequence; identical to SEQ ID NO: 18792
  GFR-binding peptide
  MOD_RES (2), (2): Xaa is C or S
  MOD_RES (18), (19), (20), (21), (22): Xaa is A or G
  MOD_RES (23), (24), (25), (26): Xaa is A or G or is absent

SEQ ID NO: 83070 - protein, 34 aa, Artificial Sequence; identical to SEQ ID NO: 18794
  GFR-binding peptide
  MOD_RES (16), (17), (18), (19), (20): Xaa is A or G
  MOD_RES (21), (22), (23), (24): Xaa is A or G or is absent

SEQ ID NO: 83071 - protein, 44 aa, Artificial Sequence; identical to SEQ ID NO: 19511
  GFR-binding peptide
  MOD_RES (5), (42), (44): Xaa is C or S

SEQ ID NO: 83072 - protein, 38 aa, Artificial Sequence; identical to SEQ ID NO: 19512
  GFR-binding peptide
  MOD_RES (35), (37): Xaa is C or S
  MOD_RES (14), (15), (16), (17), (18): Xaa is A or G
  MOD_RES (19), (20), (21), (22): Xaa is A or G or is absent

SEQ ID NO: 83073 - protein, 42 aa, Artificial Sequence; identical to SEQ ID NO: 18796
  GFR-binding peptide
  MOD_RES (5), (39), (41): Xaa is C or S
  MOD_RES (19), (20), (21), (22), (23): Xaa is A or G
  MOD_RES (24), (25), (26), (27): Xaa is A or G or is absent

SEQ ID NO: 83074 - protein, 40 aa, Artificial Sequence; identical to SEQ ID NO: 51508
  GFR-binding peptide
  MOD_RES (6), (7), (40): Xaa is C or S
  MOD_RES (21), (22), (23), (24), (25): Xaa is A or G
  MOD_RES (26), (27), (28), (29): Xaa is A or G or is absent

SEQ ID NO: 83075 - protein, 35 aa, Artificial Sequence; identical to SEQ ID NO: 53913
  GFR-binding peptide
  MOD_RES (2), (3): Xaa is C or S
  MOD_RES (17), (18), (19), (20), (21): Xaa is A or G
  MOD_RES (22), (23), (24), (25): Xaa is A or G or is absent

SEQ ID NO: 83076 - protein, 38 aa, Artificial Sequence; identical to SEQ ID NO: 19514
  GFR-binding peptide
  MOD_RES (36), (38): Xaa is C or S
  MOD_RES (15), (16), (17), (18), (19): Xaa is A or G
  MOD_RES (20), (21), (22), (23): Xaa is A or G or is absent

SEQ ID NO: 83077 - protein, 39 aa, Artificial Sequence; identical to SEQ ID NO: 19518
  GFR-binding peptide
  MOD_RES (5), (5): Xaa is C or S

SEQ ID NO: 83078 - protein, 38 aa, Artificial Sequence; identical to SEQ ID NO: 18798
  GFR-binding peptide
  MOD_RES (6), (6): Xaa is C or S
  MOD_RES (20), (21), (22), (23), (24): Xaa is A or G
  MOD_RES (25), (26), (27), (28): Xaa is A or G or is absent

SEQ ID NO: 83079 - protein, 36 aa, Artificial Sequence; identical to SEQ ID NO: 19520
  GFR-binding peptide
  MOD_RES (34), (36): Xaa is C or S
  MOD_RES (14), (15), (16), (17), (18): Xaa is A or G
  MOD_RES (19), (20), (21), (22): Xaa is A or G or is absent

SEQ ID NO: 83080 - protein, 37 aa, Artificial Sequence; identical to SEQ ID NO: 52733
  GFR-binding peptide
  MOD_RES (2), (3), (36): Xaa is C or S
  MOD_RES (17), (18), (19), (20), (21): Xaa is A or G
  MOD_RES (22), (23), (24), (25): Xaa is A or G or is absent

SEQ ID NO: 83081 - protein, 38 aa, Artificial Sequence; identical to SEQ ID NO: 19522
  GFR-binding peptide
  MOD_RES (5), (5): Xaa is C or S
  MOD_RES (19), (20), (21), (22), (23): Xaa is A or G
  MOD_RES (24), (25), (26), (27): Xaa is A or G or is absent

SEQ ID NO: 83082 - protein, 42 aa, Artificial Sequence; identical to SEQ ID NO: 52736
  GFR-binding peptide
  MOD_RES (6), (7), (40), (42): Xaa is C or S
  MOD_RES (21), (22), (23), (24), (25): Xaa is A or G
  MOD_RES (26), (27), (28), (29): Xaa is A or G or is absent

SEQ ID NO: 83083 - protein, 36 aa, Artificial Sequence; identical to SEQ ID NO: 18801
  GFR-binding peptide
  MOD_RES (2), (36): Xaa is C or S

SEQ ID NO: 83084 - protein, 33 aa, Artificial Sequence; identical to SEQ ID NO: 53918
  GFR-binding peptide
  MOD_RES (1), (1): Xaa is C or S
  MOD_RES (15), (16), (17), (18), (19): Xaa is A or G
  MOD_RES (20), (21), (22), (23): Xaa is A or G or is absent

SEQ ID NO: 83085 - protein, 37 aa, Artificial Sequence; identical to SEQ ID NO: 18802
  GFR-binding peptide
  MOD_RES (1), (1): Xaa is C or S

SEQ ID NO: 83086 - protein, 35 aa, Artificial Sequence; identical to SEQ ID NO: 51526
  GFR-binding peptide
  MOD_RES (2), (3): Xaa is C or S
  MOD_RES (17), (18), (19), (20), (21): Xaa is A or G
  MOD_RES (22), (23), (24), (25): Xaa is A or G or is absent

SEQ ID NO: 83087 - protein, 41 aa, Artificial Sequence; identical to SEQ ID NO: 55114
  GFR-binding peptide
  MOD_RES (5), (6), (39), (41): Xaa is C or S
  MOD_RES (20), (21), (22), (23), (24): Xaa is A or G
  MOD_RES (25), (26), (27), (28): Xaa is A or G or is absent

SEQ ID NO: 83088 - protein, 40 aa, Artificial Sequence; identical to SEQ ID NO: 18803
  GFR-binding peptide
  MOD_RES (3), (40): Xaa is C or S

SEQ ID NO: 83089 - protein, 33 aa, Artificial Sequence; identical to SEQ ID NO: 55117
  GFR-binding peptide
  MOD_RES (1), (2), (33): Xaa is C or S

SEQ ID NO: 83090 - protein, 45 aa, Artificial Sequence; identical to SEQ ID NO: 18804
  GFR-binding peptide
  MOD_RES (5), (42), (44): Xaa is C or S
  MOD_RES (21), (22), (23), (24), (25): Xaa is A or G
  MOD_RES (26), (27), (28), (29): Xaa is A or G or is absent

SEQ ID NO: 83091 - protein, 43 aa, Artificial Sequence; identical to SEQ ID NO: 19524
  GFR-binding peptide
  MOD_RES (4), (41), (43): Xaa is C or S

SEQ ID NO: 83092 - protein, 41 aa, Artificial Sequence; identical to SEQ ID NO: 19525
  GFR-binding peptide
  MOD_RES (2), (39), (41): Xaa is C or S
  MOD_RES (18), (19), (20), (21), (22): Xaa is A or G
  MOD_RES (23), (24), (25), (26): Xaa is A or G or is absent

SEQ ID NO: 83093 - protein, 34 aa, Artificial Sequence; identical to SEQ ID NO: 19526
  GFR-binding peptide
  MOD_RES (34), (34): Xaa is C or S

SEQ ID NO: 83094 - protein, 38 aa, Artificial Sequence; identical to SEQ ID NO: 53926
  GFR-binding peptide
  MOD_RES (2), (3), (36), (38): Xaa is C or S
  MOD_RES (17), (18), (19), (20), (21): Xaa is A or G
  MOD_RES (22), (23), (24), (25): Xaa is A or G or is absent

SEQ ID NO: 83095 - protein, 43 aa, Artificial Sequence; identical to SEQ ID NO: 18805
  GFR-binding peptide
  MOD_RES (6), (40), (42): Xaa is C or S

SEQ ID NO: 83096 - protein, 41 aa, Artificial Sequence; identical to SEQ ID NO: 53929
  GFR-binding peptide
  MOD_RES (6), (7), (40): Xaa is C or S
  MOD_RES (21), (22), (23), (24), (25): Xaa is A or G
  MOD_RES (26), (27), (28), (29): Xaa is A or G or is absent

SEQ ID NO: 83097 - protein, 39 aa, Artificial Sequence; identical to SEQ ID NO: 18806
  GFR-binding peptide
  MOD_RES (37), (39): Xaa is C or S
  MOD_RES (16), (17), (18), (19), (20): Xaa is A or G
  MOD_RES (21), (22), (23), (24): Xaa is A or G or is absent

SEQ ID NO: 83098 - protein, 41 aa, Artificial Sequence; identical to SEQ ID NO: 19527
  GFR-binding peptide
  MOD_RES (6), (40): Xaa is C or S
  MOD_RES (20), (21), (22), (23), (24): Xaa is A or G
  MOD_RES (25), (26), (27), (28): Xaa is A or G or is absent

SEQ ID NO: 83099 - protein, 37 aa, Artificial Sequence; identical to SEQ ID NO: 19528
  GFR-binding peptide
  MOD_RES (3), (3): Xaa is C or S
  MOD_RES (19), (20), (21), (22), (23): Xaa is A or G
  MOD_RES (24), (25), (26), (27): Xaa is A or G or is absent

SEQ ID NO: 83100 - protein, 35 aa, Artificial Sequence; identical to SEQ ID NO: 52751
  GFR-binding peptide
  MOD_RES (2), (3), (34): Xaa is C or S

SEQ ID NO: 83101 - protein, 37 aa, Artificial Sequence; identical to SEQ ID NO: 53932
  GFR-binding peptide
  MOD_RES (2), (3), (36): Xaa is C or S
  MOD_RES (17), (18), (19), (20), (21): Xaa is A or G
  MOD_RES (22), (23), (24), (25): Xaa is A or G or is absent

SEQ ID NO: 83102 - protein, 40 aa, Artificial Sequence; identical to SEQ ID NO: 18808
  GFR-binding peptide
  MOD_RES (2), (39): Xaa is C or S

SEQ ID NO: 83103 - protein, 35 aa, Artificial Sequence; identical to SEQ ID NO: 18809
  GFR-binding peptide
  MOD_RES (2), (2): Xaa is C or S

SEQ ID NO: 83104 - protein, 41 aa, Artificial Sequence; identical to SEQ ID NO: 19530
  GFR-binding peptide
  MOD_RES (5), (39), (41): Xaa is C or S

SEQ ID NO: 83105 - protein, 40 aa, Artificial Sequence; identical to SEQ ID NO: 51534
  GFR-binding peptide
  MOD_RES (6), (7), (38), (40): Xaa is C or S

SEQ ID NO: 83106 - protein, 39 aa, Artificial Sequence; identical to SEQ ID NO: 19531
  GFR-binding peptide
  MOD_RES (6), (6): Xaa is C or S

SEQ ID NO: 83107 - protein, 42 aa, Artificial Sequence; identical to SEQ ID NO: 52757
  GFR-binding peptide
  MOD_RES (6), (7), (40), (42): Xaa is C or S
  MOD_RES (21), (22), (23), (24), (25): Xaa is A or G
  MOD_RES (26), (27), (28), (29): Xaa is A or G or is absent

SEQ ID NO: 83108 - protein, 35 aa, Artificial Sequence; identical to SEQ ID NO: 18812
  GFR-binding peptide

SEQ ID NO: 83109 - protein, 32 aa, Artificial Sequence; identical to SEQ ID NO: 53943
  GFR-binding peptide
  MOD_RES (1), (32): Xaa is C or S

SEQ ID NO: 83110 - protein, 37 aa, Artificial Sequence; identical to SEQ ID NO: 19533
  GFR-binding peptide
  MOD_RES (3), (3): Xaa is C or S
  MOD_RES (19), (20), (21), (22), (23): Xaa is A or G
  MOD_RES (24), (25), (26), (27): Xaa is A or G or is absent

SEQ ID NO: 83111 - protein, 39 aa, Artificial Sequence; identical to SEQ ID NO: 19534
  GFR-binding peptide
  MOD_RES (1), (38): Xaa is C or S
  MOD_RES (17), (18), (19), (20), (21): Xaa is A or G
  MOD_RES (22), (23), (24), (25): Xaa is A or G or is absent

SEQ ID NO: 83112 - protein, 40 aa, Artificial Sequence; identical to SEQ ID NO: 19535
  GFR-binding peptide
  MOD_RES (6), (40): Xaa is C or S
  MOD_RES (20), (21), (22), (23), (24): Xaa is A or G
  MOD_RES (25), (26), (27), (28): Xaa is A or G or is absent

SEQ ID NO: 83113 - protein, 40 aa, Artificial Sequence; identical to SEQ ID NO: 53946
  GFR-binding peptide
  MOD_RES (6), (7), (40): Xaa is C or S
  MOD_RES (21), (22), (23), (24), (25): Xaa is A or G
  MOD_RES (26), (27), (28), (29): Xaa is A or G or is absent

SEQ ID NO: 83114 - protein, 38 aa, Artificial Sequence; identical to SEQ ID NO: 53950
  GFR-binding peptide
  MOD_RES (6), (7), (38): Xaa is C or S

SEQ ID NO: 83115 - protein, 35 aa, Artificial Sequence; identical to SEQ ID NO: 51544
  GFR-binding peptide
  MOD_RES (2), (3): Xaa is C or S
  MOD_RES (17), (18), (19), (20), (21): Xaa is A or G
  MOD_RES (22), (23), (24), (25): Xaa is A or G or is absent

SEQ ID NO: 83116 - protein, 40 aa, Artificial Sequence; identical to SEQ ID NO: 18815
  GFR-binding peptide
  MOD_RES (37), (39): Xaa is C or S
  MOD_RES (16), (17), (18), (19), (20): Xaa is A or G
  MOD_RES (21), (22), (23), (24): Xaa is A or G or is absent

SEQ ID NO: 83117 - protein, 36 aa, Artificial Sequence; identical to SEQ ID NO: 53952
  GFR-binding peptide
  MOD_RES (1), (34), (36): Xaa is C or S
  MOD_RES (15), (16), (17), (18), (19): Xaa is A or G
  MOD_RES (20), (21), (22), (23): Xaa is A or G or is absent

SEQ ID NO: 83118 - protein, 36 aa, Artificial Sequence; identical to SEQ ID NO: 18816
  GFR-binding peptide
  MOD_RES (1), (35): Xaa is C or S
  MOD_RES (15), (16), (17), (18), (19): Xaa is A or G
  MOD_RES (20), (21), (22), (23): Xaa is A or G or is absent

SEQ ID NO: 83119 - protein, 34 aa, Artificial Sequence; identical to SEQ ID NO: 51556
  GFR-binding peptide
  MOD_RES (1), (2), (33): Xaa is C or S

SEQ ID NO: 83120 - protein, 43 aa, Artificial Sequence; identical to SEQ ID NO: 19536
  GFR-binding peptide
  MOD_RES (3), (40), (42): Xaa is C or S
  MOD_RES (19), (20), (21), (22), (23): Xaa is A or G
  MOD_RES (24), (25), (26), (27): Xaa is A or G or is absent

SEQ ID NO: 83121 - protein, 35 aa, Artificial Sequence; identical to SEQ ID NO: 52770
  GFR-binding peptide
  MOD_RES (4), (5): Xaa is C or S

SEQ ID NO: 83122 - protein, 35 aa, Artificial Sequence; identical to SEQ ID NO: 51559
  GFR-binding peptide
  MOD_RES (3), (4), (35): Xaa is C or S

SEQ ID NO: 83123 - protein, 34 aa, Artificial Sequence; identical to SEQ ID NO: 18819
  GFR-binding peptide
  MOD_RES (34), (34): Xaa is C or S
  MOD_RES (14), (15), (16), (17), (18): Xaa is A or G
  MOD_RES (19), (20), (21), (22): Xaa is A or G or is absent

SEQ ID NO: 83124 - protein, 41 aa, Artificial Sequence; identical to SEQ ID NO: 53967
  GFR-binding peptide
  MOD_RES (4), (5), (38), (40): Xaa is C or S
  MOD_RES (19), (20), (21), (22), (23): Xaa is A or G
  MOD_RES (24), (25), (26), (27): Xaa is A or G or is absent

SEQ ID NO: 83125 - protein, 36 aa, Artificial Sequence; identical to SEQ ID NO: 55144
  GFR-binding peptide
  MOD_RES (1), (2), (33), (35): Xaa is C or S

SEQ ID NO: 83126 - protein, 39 aa, Artificial Sequence; identical to SEQ ID NO: 51565
  GFR-binding peptide
  MOD_RES (5), (6), (37), (39): Xaa is C or S

SEQ ID NO: 83127 - protein, 36 aa, Artificial Sequence; identical to SEQ ID NO: 53969
  GFR-binding peptide
  MOD_RES (3), (4), (35): Xaa is C or S

SEQ ID NO: 83128 - protein, 39 aa, Artificial Sequence; identical to SEQ ID NO: 52774
  GFR-binding peptide
  MOD_RES (4), (5), (36), (38): Xaa is C or S

SEQ ID NO: 83129 - protein, 40 aa, Artificial Sequence; identical to SEQ ID NO: 52775
  GFR-binding peptide
  MOD_RES (4), (5), (38), (40): Xaa is C or S
  MOD_RES (19), (20), (21), (22), (23): Xaa is A or G
  MOD_RES (24), (25), (26), (27): Xaa is A or G or is absent

SEQ ID NO: 83130 - protein, 38 aa, Artificial Sequence; identical to SEQ ID NO: 18820
  GFR-binding peptide
  MOD_RES (5), (5): Xaa is C or S

SEQ ID NO: 83131 - protein, 41 aa, Artificial Sequence; identical to SEQ ID NO: 19538
  GFR-binding peptide
  MOD_RES (7), (41): Xaa is C or S

SEQ ID NO: 83132 - protein, 35 aa, Artificial Sequence; identical to SEQ ID NO: 52781
  GFR-binding peptide
  MOD_RES (1), (34): Xaa is C or S
  MOD_RES (15), (16), (17), (18), (19): Xaa is A or G
  MOD_RES (20), (21), (22), (23): Xaa is A or G or is absent

SEQ ID NO: 83133 - protein, 44 aa, Artificial Sequence; identical to SEQ ID NO: 19539
  GFR-binding peptide
  MOD_RES (5), (42), (44): Xaa is C or S

SEQ ID NO: 83134 - protein, 34 aa, Artificial Sequence; identical to SEQ ID NO: 52786
  GFR-binding peptide
  MOD_RES (1), (34): Xaa is C or S
  MOD_RES (15), (16), (17), (18), (19): Xaa is A or G
  MOD_RES (20), (21), (22), (23): Xaa is A or G or is absent

SEQ ID NO: 83135 - protein, 42 aa, Artificial Sequence; identical to SEQ ID NO: 19540
  GFR-binding peptide
  MOD_RES (5), (42): Xaa is C or S
  MOD_RES (21), (22), (23), (24), (25): Xaa is A or G
  MOD_RES (26), (27), (28), (29): Xaa is A or G or is absent

SEQ ID NO: 83136 - protein, 38 aa, Artificial Sequence; identical to SEQ ID NO: 19542
  GFR-binding peptide
  MOD_RES (35), (37): Xaa is C or S
  MOD_RES (14), (15), (16), (17), (18): Xaa is A or G
  MOD_RES (19), (20), (21), (22): Xaa is A or G or is absent

SEQ ID NO: 83137 - protein, 30 aa, Artificial Sequence; identical to SEQ ID NO: 55161
  GFR-binding peptide

SEQ ID NO: 83138 - protein, 38 aa, Artificial Sequence; identical to SEQ ID NO: 18823
  GFR-binding peptide
  MOD_RES (4), (38): Xaa is C or S

SEQ ID NO: 83139 - protein, 35 aa, Artificial Sequence; identical to SEQ ID NO: 19545
  GFR-binding peptide
  MOD_RES (2), (2): Xaa is C or S
  MOD_RES (16), (17), (18), (19), (20): Xaa is A or G
  MOD_RES (21), (22), (23), (24): Xaa is A or G or is absent

SEQ ID NO: 83140 - protein, 37 aa, Artificial Sequence; identical to SEQ ID NO: 19546
  GFR-binding peptide
  MOD_RES (34), (36): Xaa is C or S

SEQ ID NO: 83141 - protein, 36 aa, Artificial Sequence; identical to SEQ ID NO: 51583
  GFR-binding peptide
  MOD_RES (33), (35): Xaa is C or S
  MOD_RES (14), (15), (16), (17), (18): Xaa is A or G
  MOD_RES (19), (20), (21), (22): Xaa is A or G or is absent

SEQ ID NO: 83142 - protein, 37 aa, Artificial Sequence; identical to SEQ ID NO: 19547
  GFR-binding peptide
  MOD_RES (34), (36): Xaa is C or S
  MOD_RES (14), (15), (16), (17), (18): Xaa is A or G
  MOD_RES (19), (20), (21), (22): Xaa is A or G or is absent

SEQ ID NO: 83143 - protein, 37 aa, Artificial Sequence; identical to SEQ ID NO: 18824
  GFR-binding peptide
  MOD_RES (3), (3): Xaa is C or S

SEQ ID NO: 83144 - protein, 37 aa, Artificial Sequence; identical to SEQ ID NO: 18825
  GFR-binding peptide
  MOD_RES (37), (37): Xaa is C or S
  MOD_RES (16), (17), (18), (19), (20): Xaa is A or G
  MOD_RES (21), (22), (23), (24): Xaa is A or G or is absent

SEQ ID NO: 83145 - protein, 35 aa, Artificial Sequence; identical to SEQ ID NO: 19548
  GFR-binding peptide
  MOD_RES (1), (1): Xaa is C or S
  MOD_RES (17), (18), (19), (20), (21): Xaa is A or G
  MOD_RES (22), (23), (24), (25): Xaa is A or G or is absent

SEQ ID NO: 83146 - protein, 38 aa, Artificial Sequence; identical to SEQ ID NO: 19550
  GFR-binding peptide
  MOD_RES (3), (3): Xaa is C or S
  MOD_RES (19), (20), (21), (22), (23): Xaa is A or G
  MOD_RES (24), (25), (26), (27): Xaa is A or G or is absent

SEQ ID NO: 83147 - protein, 33 aa, Artificial Sequence; identical to SEQ ID NO: 55173
  GFR-binding peptide
  MOD_RES (2), (3): Xaa is C or S

SEQ ID NO: 83148 - protein, 38 aa, Artificial Sequence; identical to SEQ ID NO: 18828
  GFR-binding peptide
  MOD_RES (1), (35), (37): Xaa is C or S
  MOD_RES (15), (16), (17), (18), (19): Xaa is A or G
  MOD_RES (20), (21), (22), (23): Xaa is A or G or is absent

SEQ ID NO: 83149 - protein, 37 aa, Artificial Sequence; identical to SEQ ID NO: 55174
  GFR-binding peptide
  MOD_RES (4), (5), (36): Xaa is C or S

SEQ ID NO: 83150 - protein, 41 aa, Artificial Sequence; identical to SEQ ID NO: 55175
  GFR-binding peptide
  MOD_RES (5), (6), (39), (41): Xaa is C or S
  MOD_RES (20), (21), (22), (23), (24): Xaa is A or G
  MOD_RES (25), (26), (27), (28): Xaa is A or G or is absent

SEQ ID NO: 83151 - protein, 43 aa, Artificial Sequence; identical to SEQ ID NO: 53989
  GFR-binding peptide
  MOD_RES (6), (7), (40), (42): Xaa is C or S
  MOD_RES (21), (22), (23), (24), (25): Xaa is A or G
  MOD_RES (26), (27), (28), (29): Xaa is A or G or is absent

SEQ ID NO: 83152 - protein, 39 aa, Artificial Sequence; identical to SEQ ID NO: 18829
  GFR-binding peptide
  MOD_RES (4), (38): Xaa is C or S

SEQ ID NO: 83153 - protein, 34 aa, Artificial Sequence; identical to SEQ ID NO: 19551
  GFR-binding peptide
  MOD_RES (15), (16), (17), (18), (19): Xaa is A or G
  MOD_RES (20), (21), (22), (23): Xaa is A or G or is absent

SEQ ID NO: 83154 - protein, 35 aa, Artificial Sequence; identical to SEQ ID NO: 19552
  GFR-binding peptide
  MOD_RES (1), (1): Xaa is C or S
  MOD_RES (17), (18), (19), (20), (21): Xaa is A or G
  MOD_RES (22), (23), (24), (25): Xaa is A or G or is absent

SEQ ID NO: 83155 - protein, 35 aa, Artificial Sequence; identical to SEQ ID NO: 51592
  GFR-binding peptide
  MOD_RES (4), (5): Xaa is C or S

SEQ ID NO: 83156 - protein, 36 aa, Artificial Sequence; identical to SEQ ID NO: 18831
  GFR-binding peptide
  MOD_RES (4), (4): Xaa is C or S
  MOD_RES (18), (19), (20), (21), (22): Xaa is A or G
  MOD_RES (23), (24), (25), (26): Xaa is A or G or is absent

SEQ ID NO: 83157 - protein, 33 aa, Artificial Sequence; identical to SEQ ID NO: 19553
  GFR-binding peptide

SEQ ID NO: 83158 - protein, 32 aa, Artificial Sequence; identical to SEQ ID NO: 51597
  GFR-binding peptide
  MOD_RES (1), (2): Xaa is C or S

SEQ ID NO: 83159 - protein, 42 aa, Artificial Sequence; identical to SEQ ID NO: 19554
  GFR-binding peptide
  MOD_RES (3), (40), (42): Xaa is C or S
  MOD_RES (19), (20), (21), (22), (23): Xaa is A or G
  MOD_RES (24), (25), (26), (27): Xaa is A or G or is absent

SEQ ID NO: 83160 - protein, 36 aa, Artificial Sequence; identical to SEQ ID NO: 18832
  GFR-binding peptide
  MOD_RES (34), (36): Xaa is C or S
  MOD_RES (14), (15), (16), (17), (18): Xaa is A or G
  MOD_RES (19), (20), (21), (22): Xaa is A or G or is absent

SEQ ID NO: 83161 - protein, 42 aa, Artificial Sequence; identical to SEQ ID NO: 52803
  GFR-binding peptide
  MOD_RES (5), (6), (39), (41): Xaa is C or S
  MOD_RES (20), (21), (22), (23), (24): Xaa is A or G
  MOD_RES (25), (26), (27), (28): Xaa is A or G or is absent

SEQ ID NO: 83162 - protein, 39 aa, Artificial Sequence; identical to SEQ ID NO: 55186
  GFR-binding peptide
  MOD_RES (6), (7): Xaa is C or S
  MOD_RES (21), (22), (23), (24), (25): Xaa is A or G
  MOD_RES (26), (27), (28), (29): Xaa is A or G or is absent

SEQ ID NO: 83163 - protein, 32 aa, Artificial Sequence; identical to SEQ ID NO: 53998
  GFR-binding peptide
  MOD_RES (1), (2): Xaa is C or S

SEQ ID NO: 83164 - protein, 38 aa, Artificial Sequence; identical to SEQ ID NO: 19555
  GFR-binding peptide
  MOD_RES (1), (38): Xaa is C or S
  MOD_RES (17), (18), (19), (20), (21): Xaa is A or G
  MOD_RES (22), (23), (24), (25): Xaa is A or G or is absent

SEQ ID NO: 83165 - protein, 36 aa, Artificial Sequence; identical to SEQ ID NO: 19556
  GFR-binding peptide
  MOD_RES (4), (4): Xaa is C or S
  MOD_RES (18), (19), (20), (21), (22): Xaa is A or G
  MOD_RES (23), (24), (25), (26): Xaa is A or G or is absent

SEQ ID NO: 83166 - protein, 41 aa, Artificial Sequence; identical to SEQ ID NO: 18836
  GFR-binding peptide
  MOD_RES (3), (40): Xaa is C or S
  MOD_RES (19), (20), (21), (22), (23): Xaa is A or G
  MOD_RES (24), (25), (26), (27): Xaa is A or G or is absent

SEQ ID NO: 83167 - protein, 40 aa, Artificial Sequence; identical to SEQ ID NO: 18837
  GFR-binding peptide
  MOD_RES (2), (39): Xaa is C or S
  MOD_RES (18), (19), (20), (21), (22): Xaa is A or G
  MOD_RES (23), (24), (25), (26): Xaa is A or G or is absent

SEQ ID NO: 83168 - protein, 43 aa, Artificial Sequence; identical to SEQ ID NO: 18838
  GFR-binding peptide
  MOD_RES (5), (42): Xaa is C or S

SEQ ID NO: 83169 - protein, 42 aa, Artificial Sequence; identical to SEQ ID NO: 51604
  GFR-binding peptide
  MOD_RES (6), (7), (40), (42): Xaa is C or S
  MOD_RES (21), (22), (23), (24), (25): Xaa is A or G
  MOD_RES (26), (27), (28), (29): Xaa is A or G or is absent

SEQ ID NO: 83170 - protein, 39 aa, Artificial Sequence; identical to SEQ ID NO: 18839
  GFR-binding peptide
  MOD_RES (5), (39): Xaa is C or S

SEQ ID NO: 83171 - protein, 40 aa, Artificial Sequence; identical to SEQ ID NO: 52809
  GFR-binding peptide
  MOD_RES (4), (5), (38), (40): Xaa is C or S
  MOD_RES (19), (20), (21), (22), (23): Xaa is A or G
  MOD_RES (24), (25), (26), (27): Xaa is A or G or is absent

SEQ ID NO: 83172 - protein, 34 aa, Artificial Sequence; identical to SEQ ID NO: 19561
  GFR-binding peptide
  MOD_RES (34), (34): Xaa is C or S

SEQ ID NO: 83173 - protein, 35 aa, Artificial Sequence; identical to SEQ ID NO: 18840
  GFR-binding peptide
  MOD_RES (35), (35): Xaa is C or S
  MOD_RES (14), (15), (16), (17), (18): Xaa is A or G
  MOD_RES (19), (20), (21), (22): Xaa is A or G or is absent

SEQ ID NO: 83174 - protein, 38 aa, Artificial Sequence; identical to SEQ ID NO: 18841
  GFR-binding peptide
  MOD_RES (1), (38): Xaa is C or S

SEQ ID NO: 83175 - protein, 40 aa, Artificial Sequence; identical to SEQ ID NO: 55196
  GFR-binding peptide
  MOD_RES (5), (6), (37), (39): Xaa is C or S

SEQ ID NO: 83176 - protein, 41 aa, Artificial Sequence; identical to SEQ ID NO: 19562
  GFR-binding peptide
  MOD_RES (4), (38), (40): Xaa is C or S
  MOD_RES (18), (19), (20), (21), (22): Xaa is A or G
  MOD_RES (23), (24), (25), (26): Xaa is A or G or is absent

SEQ ID NO: 83177 - protein, 38 aa, Artificial Sequence; identical to SEQ ID NO: 19564
  GFR-binding peptide
  MOD_RES (1), (35), (37): Xaa is C or S

SEQ ID NO: 83178 - protein, 34 aa, Artificial Sequence; identical to SEQ ID NO: 55204
  GFR-binding peptide
  MOD_RES (1), (2), (33): Xaa is C or S

SEQ ID NO: 83179 - protein, 37 aa, Artificial Sequence; identical to SEQ ID NO: 55205
  GFR-binding peptide
  MOD_RES (5), (6), (37): Xaa is C or S

SEQ ID NO: 83180 - protein, 31 aa, Artificial Sequence; identical to SEQ ID NO: 51610
  GFR-binding peptide
  MOD_RES (31), (31): Xaa is C or S

SEQ ID NO: 83181 - protein, 35 aa, Artificial Sequence; identical to SEQ ID NO: 54013
  GFR-binding peptide
  MOD_RES (1), (32), (34): Xaa is C or S

SEQ ID NO: 83182 - protein, 35 aa, Artificial Sequence; identical to SEQ ID NO: 19565
  GFR-binding peptide
  MOD_RES (35), (35): Xaa is C or S
  MOD_RES (14), (15), (16), (17), (18): Xaa is A or G
  MOD_RES (19), (20), (21), (22): Xaa is A or G or is absent

SEQ ID NO: 83183 - protein, 32 aa, Artificial Sequence; identical to SEQ ID NO: 51612
  GFR-binding peptide
  MOD_RES (14), (15), (16), (17), (18): Xaa is A or G
  MOD_RES (19), (20), (21), (22): Xaa is A or G or is absent

SEQ ID NO: 83184 - protein, 41 aa, Artificial Sequence; identical to SEQ ID NO: 18844
  GFR-binding peptide
  MOD_RES (3), (40): Xaa is C or S
  MOD_RES (19), (20), (21), (22), (23): Xaa is A or G
  MOD_RES (24), (25), (26), (27): Xaa is A or G or is absent

SEQ ID NO: 83185 - protein, 36 aa, Artificial Sequence; identical to SEQ ID NO: 18845
  GFR-binding peptide
  MOD_RES (1), (1): Xaa is C or S
  MOD_RES (17), (18), (19), (20), (21): Xaa is A or G
  MOD_RES (22), (23), (24), (25): Xaa is A or G or is absent

SEQ ID NO: 83186 - protein, 43 aa, Artificial Sequence; identical to SEQ ID NO: 52818
  GFR-binding peptide
  MOD_RES (6), (7), (40), (42): Xaa is C or S
  MOD_RES (21), (22), (23), (24), (25): Xaa is A or G
  MOD_RES (26), (27), (28), (29): Xaa is A or G or is absent

SEQ ID NO: 83187 - protein, 39 aa, Artificial Sequence; identical to SEQ ID NO: 51620
  GFR-binding peptide
  MOD_RES (5), (6), (39): Xaa is C or S
  MOD_RES (20), (21), (22), (23), (24): Xaa is A or G
  MOD_RES (25), (26), (27), (28): Xaa is A or G or is absent

SEQ ID NO: 83188 - protein, 34 aa, Artificial Sequence; identical to SEQ ID NO: 51621
  GFR-binding peptide
  MOD_RES (3), (4): Xaa is C or S

SEQ ID NO: 83189 - protein, 33 aa, Artificial Sequence; identical to SEQ ID NO: 18848
  GFR-binding peptide
  MOD_RES (1), (1): Xaa is C or S

SEQ ID NO: 83190 - protein, 37 aa, Artificial Sequence; identical to SEQ ID NO: 54020
  GFR-binding peptide
  MOD_RES (4), (5), (36): Xaa is C or S

SEQ ID NO: 83191 - protein, 37 aa, Artificial Sequence; identical to SEQ ID NO: 18849
  GFR-binding peptide
  MOD_RES (1), (1): Xaa is C or S
  MOD_RES (17), (18), (19), (20), (21): Xaa is A or G
  MOD_RES (22), (23), (24), (25): Xaa is A or G or is absent

SEQ ID NO: 83192 - protein, 32 aa, Artificial Sequence; identical to SEQ ID NO: 51627
  GFR-binding peptide
  MOD_RES (14), (15), (16), (17), (18): Xaa is A or G
  MOD_RES (19), (20), (21), (22): Xaa is A or G or is absent

SEQ ID NO: 83193 - protein, 41 aa, Artificial Sequence; identical to SEQ ID NO: 18851
  GFR-binding peptide
  MOD_RES (6), (40): Xaa is C or S

SEQ ID NO: 83194 - protein, 32 aa, Artificial Sequence; identical to SEQ ID NO: 52825
  GFR-binding peptide
  MOD_RES (14), (15), (16), (17), (18): Xaa is A or G
  MOD_RES (19), (20), (21), (22): Xaa is A or G or is absent

SEQ ID NO: 83195 - protein, 38 aa, Artificial Sequence; identical to SEQ ID NO: 19569
  GFR-binding peptide
  MOD_RES (3), (37): Xaa is C or S

SEQ ID NO: 83196 - protein, 42 aa, Artificial Sequence; identical to SEQ ID NO: 18854
  GFR-binding peptide
  MOD_RES (7), (41): Xaa is C or S

SEQ ID NO: 83197 - protein, 43 aa, Artificial Sequence; identical to SEQ ID NO: 19570
  GFR-binding peptide
  MOD_RES (7), (41), (43): Xaa is C or S
  MOD_RES (21), (22), (23), (24), (25): Xaa is A or G
  MOD_RES (26), (27), (28), (29): Xaa is A or G or is absent

SEQ ID NO: 83198 - protein, 34 aa, Artificial Sequence; identical to SEQ ID NO: 55224
  GFR-binding peptide
  MOD_RES (1), (34): Xaa is C or S
  MOD_RES (15), (16), (17), (18), (19): Xaa is A or G
  MOD_RES (20), (21), (22), (23): Xaa is A or G or is absent

SEQ ID NO: 83199 - protein, 39 aa, Artificial Sequence; identical to SEQ ID NO: 52831
  GFR-binding peptide
  MOD_RES (3), (4), (37), (39): Xaa is C or S
  MOD_RES (18), (19), (20), (21), (22): Xaa is A or G
  MOD_RES (23), (24), (25), (26): Xaa is A or G or is absent

SEQ ID NO: 83200 - protein, 39 aa, Artificial Sequence; identical to SEQ ID NO: 19573
  GFR-binding peptide
  MOD_RES (3), (3): Xaa is C or S
  MOD_RES (19), (20), (21), (22), (23): Xaa is A or G
  MOD_RES (24), (25), (26), (27): Xaa is A or G or is absent

SEQ ID NO: 83201 - protein, 39 aa, Artificial Sequence; identical to SEQ ID NO: 19575
  GFR-binding peptide
  MOD_RES (2), (36), (38): Xaa is C or S

SEQ ID NO: 83202 - protein, 43 aa, Artificial Sequence; identical to SEQ ID NO: 18856
  GFR-binding peptide
  MOD_RES (6), (40), (42): Xaa is C or S
  MOD_RES (20), (21), (22), (23), (24): Xaa is A or G
  MOD_RES (25), (26), (27), (28): Xaa is A or G or is absent

SEQ ID NO: 83203 - protein, 36 aa, Artificial Sequence; identical to SEQ ID NO: 19577
  GFR-binding peptide
  MOD_RES (34), (36): Xaa is C or S

SEQ ID NO: 83204 - protein, 44 aa, Artificial Sequence; identical to SEQ ID NO: 18857
  GFR-binding peptide
  MOD_RES (4), (41), (43): Xaa is C or S
  MOD_RES (20), (21), (22), (23), (24): Xaa is A or G
  MOD_RES (25), (26), (27), (28): Xaa is A or G or is absent

SEQ ID NO: 83205 - protein, 36 aa, Artificial Sequence; identical to SEQ ID NO: 18858
  GFR-binding peptide
  MOD_RES (34), (36): Xaa is C or S

SEQ ID NO: 83206 - protein, 38 aa, Artificial Sequence; identical to SEQ ID NO: 19579
  GFR-binding peptide
  MOD_RES (4), (4): Xaa is C or S
  MOD_RES (20), (21), (22), (23), (24): Xaa is A or G
  MOD_RES (25), (26), (27), (28): Xaa is A or G or is absent

SEQ ID NO: 83207 - protein, 43 aa, Artificial Sequence; identical to SEQ ID NO: 18862
  GFR-binding peptide
  MOD_RES (7), (41), (43): Xaa is C or S
  MOD_RES (21), (22), (23), (24), (25): Xaa is A or G
  MOD_RES (26), (27), (28), (29): Xaa is A or G or is absent

SEQ ID NO: 83208 - protein, 39 aa, Artificial Sequence; identical to SEQ ID NO: 19581
  GFR-binding peptide
  MOD_RES (3), (3): Xaa is C or S
  MOD_RES (19), (20), (21), (22), (23): Xaa is A or G
  MOD_RES (24), (25), (26), (27): Xaa is A or G or is absent

SEQ ID NO: 83209 - protein, 34 aa, Artificial Sequence; identical to SEQ ID NO: 55236
  GFR-binding peptide
  MOD_RES (2), (3), (34): Xaa is C or S

SEQ ID NO: 83210 - protein, 37 aa, Artificial Sequence; identical to SEQ ID NO: 18865
  GFR-binding peptide
  MOD_RES (3), (3): Xaa is C or S
  MOD_RES (19), (20), (21), (22), (23): Xaa is A or G
  MOD_RES (24), (25), (26), (27): Xaa is A or G or is absent

SEQ ID NO: 83211 - protein, 39 aa, Artificial Sequence; identical to SEQ ID NO: 19582
  GFR-binding peptide
  MOD_RES (5), (39): Xaa is C or S
  MOD_RES (19), (20), (21), (22), (23): Xaa is A or G
  MOD_RES (24), (25), (26), (27): Xaa is A or G or is absent

SEQ ID NO: 83212 - protein, 35 aa, Artificial Sequence; identical to SEQ ID NO: 51649
  GFR-binding peptide
  MOD_RES (2), (3), (34): Xaa is C or S

SEQ ID NO: 83213 - protein, 37 aa, Artificial Sequence; identical to SEQ ID NO: 18867
  GFR-binding peptide
  MOD_RES (3), (3): Xaa is C or S
  MOD_RES (19), (20), (21), (22), (23): Xaa is A or G
  MOD_RES (24), (25), (26), (27): Xaa is A or G or is absent

SEQ ID NO: 83214 - protein, 44 aa, Artificial Sequence; identical to SEQ ID NO: 19583
  GFR-binding peptide
  MOD_RES (7), (41), (43): Xaa is C or S
  MOD_RES (21), (22), (23), (24), (25): Xaa is A or G
  MOD_RES (26), (27), (28), (29): Xaa is A or G or is absent

SEQ ID NO: 83215 - protein, 42 aa, Artificial Sequence; identical to SEQ ID NO: 19584
  GFR-binding peptide
  MOD_RES (7), (41): Xaa is C or S
  MOD_RES (21), (22), (23), (24), (25): Xaa is A or G
  MOD_RES (26), (27), (28), (29): Xaa is A or G or is absent

SEQ ID NO: 83216 - protein, 39 aa, Artificial Sequence; identical to SEQ ID NO: 19585
  GFR-binding peptide
  MOD_RES (2), (39): Xaa is C or S
  MOD_RES (18), (19), (20), (21), (22): Xaa is A or G
  MOD_RES (23), (24), (25), (26): Xaa is A or G or is absent

SEQ ID NO: 83217 - protein, 32 aa, Artificial Sequence; identical to SEQ ID NO: 19586
  GFR-binding peptide

SEQ ID NO: 83218 - protein, 34 aa, Artificial Sequence; identical to SEQ ID NO: 55238
  GFR-binding peptide
  MOD_RES (33), (33): Xaa is C or S
  MOD_RES (14), (15), (16), (17), (18): Xaa is A or G
  MOD_RES (19), (20), (21), (22): Xaa is A or G or is absent

SEQ ID NO: 83219 - protein, 44 aa, Artificial Sequence; identical to SEQ ID NO: 19587
  GFR-binding peptide
  MOD_RES (4), (41), (43): Xaa is C or S

SEQ ID NO: 83220 - protein, 35 aa, Artificial Sequence; identical to SEQ ID NO: 51654
  GFR-binding peptide
  MOD_RES (2), (3), (34): Xaa is C or S

SEQ ID NO: 83221 - protein, 41 aa, Artificial Sequence; identical to SEQ ID NO: 18870
  GFR-binding peptide
  MOD_RES (3), (40): Xaa is C or S

SEQ ID NO: 83222 - protein, 33 aa, Artificial Sequence; identical to SEQ ID NO: 19589
  GFR-binding peptide
  MOD_RES (14), (15), (16), (17), (18): Xaa is A or G
  MOD_RES (19), (20), (21), (22): Xaa is A or G or is absent

SEQ ID NO: 83223 - protein, 34 aa, Artificial Sequence; identical to SEQ ID NO: 18871
  GFR-binding peptide
  MOD_RES (2), (2): Xaa is C or S
  MOD_RES (16), (17), (18), (19), (20): Xaa is A or G
  MOD_RES (21), (22), (23), (24): Xaa is A or G or is absent

SEQ ID NO: 83224 - protein, 30 aa, Artificial Sequence; identical to SEQ ID NO: 51656
  GFR-binding peptide

SEQ ID NO: 83225 - protein, 36 aa, Artificial Sequence; identical to SEQ ID NO: 19591
  GFR-binding peptide
  MOD_RES (16), (17), (18), (19), (20): Xaa is A or G
  MOD_RES (21), (22), (23), (24): Xaa is A or G or is absent

SEQ ID NO: 83226 - protein, 39 aa, Artificial Sequence; identical to SEQ ID NO: 54052
  GFR-binding peptide
  MOD_RES (5), (6), (37), (39): Xaa is C or S

SEQ ID NO: 83227 - protein, 40 aa, Artificial Sequence; identical to SEQ ID NO: 18874
  GFR-binding peptide
  MOD_RES (5), (39): Xaa is C or S

SEQ ID NO: 83228 - protein, 37 aa, Artificial Sequence; identical to SEQ ID NO: 19596
  GFR-binding peptide
  MOD_RES (2), (36): Xaa is C or S
  MOD_RES (16), (17), (18), (19), (20): Xaa is A or G
  MOD_RES (21), (22), (23), (24): Xaa is A or G or is absent

SEQ ID NO: 83229 - protein, 39 aa, Artificial Sequence; identical to SEQ ID NO: 18877
  GFR-binding peptide
  MOD_RES (6), (6): Xaa is C or S
  MOD_RES (20), (21), (22), (23), (24): Xaa is A or G
  MOD_RES (25), (26), (27), (28): Xaa is A or G or is absent

SEQ ID NO: 83230 - protein, 39 aa, Artificial Sequence; identical to SEQ ID NO: 55248
  GFR-binding peptide
  MOD_RES (4), (5), (38): Xaa is C or S
  MOD_RES (19), (20), (21), (22), (23): Xaa is A or G
  MOD_RES (24), (25), (26), (27): Xaa is A or G or is absent

SEQ ID NO: 83231 - protein, 37 aa, Artificial Sequence; identical to SEQ ID NO: 18878
  GFR-binding peptide
  MOD_RES (3), (37): Xaa is C or S
  MOD_RES (17), (18), (19), (20), (21): Xaa is A or G
  MOD_RES (22), (23), (24), (25): Xaa is A or G or is absent

SEQ ID NO: 83232 - protein, 42 aa, Artificial Sequence; identical to SEQ ID NO: 19597
  GFR-binding peptide
  MOD_RES (2), (39), (41): Xaa is C or S
  MOD_RES (18), (19), (20), (21), (22): Xaa is A or G
  MOD_RES (23), (24), (25), (26): Xaa is A or G or is absent

SEQ ID NO: 83233 - protein, 36 aa, Artificial Sequence; identical to SEQ ID NO: 52854
  GFR-binding peptide
  MOD_RES (33), (35): Xaa is C or S
  MOD_RES (14), (15), (16), (17), (18): Xaa is A or G
  MOD_RES (19), (20), (21), (22): Xaa is A or G or is absent

SEQ ID NO: 83234 - protein, 34 aa, Artificial Sequence; identical to SEQ ID NO: 18880
  GFR-binding peptide
  MOD_RES (34), (34): Xaa is C or S
  MOD_RES (14), (15), (16), (17), (18): Xaa is A or G
  MOD_RES (19), (20), (21), (22): Xaa is A or G or is absent

SEQ ID NO: 83235 - protein, 38 aa, Artificial Sequence; identical to SEQ ID NO: 19598
  GFR-binding peptide
  MOD_RES (4), (4): Xaa is C or S
  MOD_RES (20), (21), (22), (23), (24): Xaa is A or G
  MOD_RES (25), (26), (27), (28): Xaa is A or G or is absent

SEQ ID NO: 83236 - protein, 39 aa, Artificial Sequence; identical to SEQ ID NO: 18881
  GFR-binding peptide
  MOD_RES (5), (39): Xaa is C or S

SEQ ID NO: 83237 - protein, 37 aa, Artificial Sequence; identical to SEQ ID NO: 19599
  GFR-binding peptide
  MOD_RES (3), (37): Xaa is C or S

SEQ ID NO: 83238 - protein, 35 aa, Artificial Sequence; identical to SEQ ID NO: 51674
  GFR-binding peptide
  MOD_RES (1), (2), (35): Xaa is C or S
  MOD_RES (16), (17), (18), (19), (20): Xaa is A or G
  MOD_RES (21), (22), (23), (24): Xaa is A or G or is absent

SEQ ID NO: 83239 - protein, 39 aa, Artificial Sequence; identical to SEQ ID NO: 18882
  GFR-binding peptide
  MOD_RES (4), (4): Xaa is C or S

SEQ ID NO: 83240 - protein, 37 aa, Artificial Sequence; identical to SEQ ID NO: 18884
  GFR-binding peptide
  MOD_RES (2), (36): Xaa is C or S

SEQ ID NO: 83241 - protein, 36 aa, Artificial Sequence; identical to SEQ ID NO: 55263
  GFR-binding peptide
  MOD_RES (1), (2), (33), (35): Xaa is C or S

SEQ ID NO: 83242 - protein, 40 aa, Artificial Sequence; identical to SEQ ID NO: 19600
  GFR-binding peptide
  MOD_RES (3), (37), (39): Xaa is C or S
  MOD_RES (17), (18), (19), (20), (21): Xaa is A or G
  MOD_RES (22), (23), (24), (25): Xaa is A or G or is absent

SEQ ID NO: 83243 - protein, 39 aa, Artificial Sequence; identical to SEQ ID NO: 52860
  GFR-binding peptide
  MOD_RES (4), (5), (38): Xaa is C or S
  MOD_RES (19), (20), (21), (22), (23): Xaa is A or G
  MOD_RES (24), (25), (26), (27): Xaa is A or G or is absent

SEQ ID NO: 83244 - protein, 37 aa, Artificial Sequence; identical to SEQ ID NO: 19601
  GFR-binding peptide
  MOD_RES (5), (5): Xaa is C or S
  MOD_RES (19), (20), (21), (22), (23): Xaa is A or G
  MOD_RES (24), (25), (26), (27): Xaa is A or G or is absent

SEQ ID NO: 83245 - protein, 38 aa, Artificial Sequence; identical to SEQ ID NO: 51678
  GFR-binding peptide
  MOD_RES (3), (4), (37): Xaa is C or S
  MOD_RES (18), (19), (20), (21), (22): Xaa is A or G
  MOD_RES (23), (24), (25), (26): Xaa is A or G or is absent

SEQ ID NO: 83246 - protein, 40 aa, Artificial Sequence; identical to SEQ ID NO: 52862
  GFR-binding peptide
  MOD_RES (6), (7), (40): Xaa is C or S
  MOD_RES (21), (22), (23), (24), (25): Xaa is A or G
  MOD_RES (26), (27), (28), (29): Xaa is A or G or is absent

SEQ ID NO: 83247 - protein, 32 aa, Artificial Sequence; identical to SEQ ID NO: 55266
  GFR-binding peptide
  MOD_RES (31), (31): Xaa is C or S

SEQ ID NO: 83248 - protein, 37 aa, Artificial Sequence; identical to SEQ ID NO: 18887
  GFR-binding peptide
  MOD_RES (2), (36): Xaa is C or S
  MOD_RES (16), (17), (18), (19), (20): Xaa is A or G
  MOD_RES (21), (22), (23), (24): Xaa is A or G or is absent

SEQ ID NO: 83249 - protein, 35 aa, Artificial Sequence; identical to SEQ ID NO: 55271
  GFR-binding peptide
  MOD_RES (1), (34): Xaa is C or S
  MOD_RES (15), (16), (17), (18), (19): Xaa is A or G
  MOD_RES (20), (21), (22), (23): Xaa is A or G or is absent

SEQ ID NO: 83250 - protein, 41 aa, Artificial Sequence; identical to SEQ ID NO: 19602
  GFR-binding peptide
  MOD_RES (4), (41): Xaa is C or S

SEQ ID NO: 83251 - protein, 39 aa, Artificial Sequence; identical to SEQ ID NO: 18891
  GFR-binding peptide
  MOD_RES (7), (7): Xaa is C or S
  MOD_RES (21), (22), (23), (24), (25): Xaa is A or G
  MOD_RES (26), (27), (28), (29): Xaa is A or G or is absent

SEQ ID NO: 83252 - protein, 36 aa, Artificial Sequence; identical to SEQ ID NO: 52867
  GFR-binding peptide
  MOD_RES (4), (5), (36): Xaa is C or S

SEQ ID NO: 83253 - protein, 40 aa, Artificial Sequence; identical to SEQ ID NO: 54080
  GFR-binding peptide
  MOD_RES (5), (6), (37), (39): Xaa is C or S

SEQ ID NO: 83254 - protein, 39 aa, Artificial Sequence; identical to SEQ ID NO: 19603
  GFR-binding peptide
  MOD_RES (7), (7): Xaa is C or S
  MOD_RES (21), (22), (23), (24), (25): Xaa is A or G
  MOD_RES (26), (27), (28), (29): Xaa is A or G or is absent

SEQ ID NO: 83255 - protein, 36 aa, Artificial Sequence; identical to SEQ ID NO: 54082
  GFR-binding peptide
  MOD_RES (2), (3), (36): Xaa is C or S
  MOD_RES (17), (18), (19), (20), (21): Xaa is A or G
  MOD_RES (22), (23), (24), (25): Xaa is A or G or is absent

SEQ ID NO: 83256 - protein, 40 aa, Artificial Sequence; identical to SEQ ID NO: 18892
  GFR-binding peptide
  MOD_RES (7), (7): Xaa is C or S
  MOD_RES (21), (22), (23), (24), (25): Xaa is A or G
  MOD_RES (26), (27), (28), (29): Xaa is A or G or is absent

SEQ ID NO: 83257 - protein, 35 aa, Artificial Sequence; identical to SEQ ID NO: 52875
  GFR-binding peptide
  MOD_RES (33), (35): Xaa is C or S
  MOD_RES (14), (15), (16), (17), (18): Xaa is A or G
  MOD_RES (19), (20), (21), (22): Xaa is A or G or is absent

SEQ ID NO: 83258 - protein, 40 aa, Artificial Sequence; identical to SEQ ID NO: 19604
  GFR-binding peptide
  MOD_RES (4), (38), (40): Xaa is C or S

SEQ ID NO: 83259 - protein, 37 aa, Artificial Sequence; identical to SEQ ID NO: 51690
  GFR-binding peptide
  MOD_RES (2), (3), (36): Xaa is C or S
  MOD_RES (17), (18), (19), (20), (21): Xaa is A or G
  MOD_RES (22), (23), (24), (25): Xaa is A or G or is absent

SEQ ID NO: 83260 - protein, 39 aa, Artificial Sequence; identical to SEQ ID NO: 19605
  GFR-binding peptide
  MOD_RES (5), (39): Xaa is C or S
  MOD_RES (19), (20), (21), (22), (23): Xaa is A or G
  MOD_RES (24), (25), (26), (27): Xaa is A or G or is absent

SEQ ID NO: 83261 - protein, 40 aa, Artificial Sequence; identical to SEQ ID NO: 18895
  GFR-binding peptide
  MOD_RES (4), (4): Xaa is C or S

SEQ ID NO: 83262 - protein, 34 aa, Artificial Sequence; identical to SEQ ID NO: 18896
  GFR-binding peptide
  MOD_RES (1), (1): Xaa is C or S
  MOD_RES (15), (16), (17), (18), (19): Xaa is A or G
  MOD_RES (20), (21), (22), (23): Xaa is A or G or is absent

SEQ ID NO: 83263 - protein, 35 aa, Artificial Sequence; identical to SEQ ID NO: 54089
  GFR-binding peptide
  MOD_RES (1), (2), (35): Xaa is C or S
  MOD_RES (16), (17), (18), (19), (20): Xaa is A or G
  MOD_RES (21), (22), (23), (24): Xaa is A or G or is absent

SEQ ID NO: 83264 - protein, 33 aa, Artificial Sequence; identical to SEQ ID NO: 54090
  GFR-binding peptide
  MOD_RES (31), (33): Xaa is C or S

SEQ ID NO: 83265 - protein, 35 aa, Artificial Sequence; identical to SEQ ID NO: 52881
  GFR-binding peptide
  MOD_RES (33), (35): Xaa is C or S
  MOD_RES (14), (15), (16), (17), (18): Xaa is A or G
  MOD_RES (19), (20), (21), (22): Xaa is A or G or is absent

SEQ ID NO: 83266 - protein, 35 aa, Artificial Sequence; identical to SEQ ID NO: 19607
  GFR-binding peptide
  MOD_RES (1), (35): Xaa is C or S

SEQ ID NO: 83267 - protein, 38 aa, Artificial Sequence; identical to SEQ ID NO: 19608
  GFR-binding peptide
  MOD_RES (37), (37): Xaa is C or S

SEQ ID NO: 83268 - protein, 34 aa, Artificial Sequence; identical to SEQ ID NO: 55286
  GFR-binding peptide
  MOD_RES (3), (4): Xaa is C or S

SEQ ID NO: 83269 - protein, 39 aa, Artificial Sequence; identical to SEQ ID NO: 51697
  GFR-binding peptide
  MOD_RES (4), (5), (38): Xaa is C or S
  MOD_RES (19), (20), (21), (22), (23): Xaa is A or G
  MOD_RES (24), (25), (26), (27): Xaa is A or G or is absent

SEQ ID NO: 83270 - protein, 34 aa, Artificial Sequence; identical to SEQ ID NO: 51698
  GFR-binding peptide
  MOD_RES (2), (3), (34): Xaa is C or S

SEQ ID NO: 83271 - protein, 36 aa, Artificial Sequence; identical to SEQ ID NO: 55288
  GFR-binding peptide
  MOD_RES (3), (4): Xaa is C or S
  MOD_RES (18), (19), (20), (21), (22): Xaa is A or G
  MOD_RES (23), (24), (25), (26): Xaa is A or G or is absent

SEQ ID NO: 83272 - protein, 32 aa, Artificial Sequence; identical to SEQ ID NO: 54095
  GFR-binding peptide
  MOD_RES (14), (15), (16), (17), (18): Xaa is A or G
  MOD_RES (19), (20), (21), (22): Xaa is A or G or is absent

SEQ ID NO: 83273 - protein, 34 aa, Artificial Sequence; identical to SEQ ID NO: 18902
  GFR-binding peptide
  MOD_RES (14), (15), (16), (17), (18): Xaa is A or G
  MOD_RES (19), (20), (21), (22): Xaa is A or G or is absent

SEQ ID NO: 83274 - protein, 35 aa, Artificial Sequence; identical to SEQ ID NO: 52890
  GFR-binding peptide
  MOD_RES (33), (35): Xaa is C or S
  MOD_RES (14), (15), (16), (17), (18): Xaa is A or G
  MOD_RES (19), (20), (21), (22): Xaa is A or G or is absent

SEQ ID NO: 83275 - protein, 39 aa, Artificial Sequence; identical to SEQ ID NO: 18903
  GFR-binding peptide
  MOD_RES (3), (37), (39): Xaa is C or S
  MOD_RES (17), (18), (19), (20), (21): Xaa is A or G
  MOD_RES (22), (23), (24), (25): Xaa is A or G or is absent

SEQ ID NO: 83276 - protein, 39 aa, Artificial Sequence; identical to SEQ ID NO: 19613
  GFR-binding peptide
  MOD_RES (6), (6): Xaa is C or S
  MOD_RES (20), (21), (22), (23), (24): Xaa is A or G
  MOD_RES (25), (26), (27), (28): Xaa is A or G or is absent

SEQ ID NO: 83277 - protein, 32 aa, Artificial Sequence; identical to SEQ ID NO: 52893
  GFR-binding peptide
  MOD_RES (1), (2): Xaa is C or S

SEQ ID NO: 83278 - protein, 34 aa, Artificial Sequence; identical to SEQ ID NO: 19615
  GFR-binding peptide
  MOD_RES (2), (2): Xaa is C or S

SEQ ID NO: 83279 - protein, 35 aa, Artificial Sequence; identical to SEQ ID NO: 18906
  GFR-binding peptide
  MOD_RES (1), (1): Xaa is C or S
  MOD_RES (17), (18), (19), (20), (21): Xaa is A or G
  MOD_RES (22), (23), (24), (25): Xaa is A or G or is absent

SEQ ID NO: 83280 - protein, 37 aa, Artificial Sequence; identical to SEQ ID NO: 18909
  GFR-binding peptide
  MOD_RES (1), (35), (37): Xaa is C or S
  MOD_RES (15), (16), (17), (18), (19): Xaa is A or G
  MOD_RES (20), (21), (22), (23): Xaa is A or G or is absent

SEQ ID NO: 83281 - protein, 42 aa, Artificial Sequence; identical to SEQ ID NO: 18910
  GFR-binding peptide
  MOD_RES (5), (39), (41): Xaa is C or S

SEQ ID NO: 83282 - protein, 35 aa, Artificial Sequence; identical to SEQ ID NO: 19617
  GFR-binding peptide
  MOD_RES (34), (34): Xaa is C or S
  MOD_RES (14), (15), (16), (17), (18): Xaa is A or G
  MOD_RES (19), (20), (21), (22): Xaa is A or G or is absent

SEQ ID NO: 83283 - protein, 36 aa, Artificial Sequence; identical to SEQ ID NO: 19618
  GFR-binding peptide

SEQ ID NO: 83284 - protein, 36 aa, Artificial Sequence; identical to SEQ ID NO: 19619
  GFR-binding peptide
  MOD_RES (36), (36): Xaa is C or S

SEQ ID NO: 83285 - protein, 33 aa, Artificial Sequence; identical to SEQ ID NO: 55297
  GFR-binding peptide
  MOD_RES (33), (33): Xaa is C or S
  MOD_RES (14), (15), (16), (17), (18): Xaa is A or G
  MOD_RES (19), (20), (21), (22): Xaa is A or G or is absent

SEQ ID NO: 83286 - protein, 38 aa, Artificial Sequence; identical to SEQ ID NO: 19620
  GFR-binding peptide
  MOD_RES (4), (38): Xaa is C or S
  MOD_RES (18), (19), (20), (21), (22): Xaa is A or G
  MOD_RES (23), (24), (25), (26): Xaa is A or G or is absent

SEQ ID NO: 83287 - protein, 41 aa, Artificial Sequence; identical to SEQ ID NO: 18911
  GFR-binding peptide
  MOD_RES (2), (39), (41): Xaa is C or S
  MOD_RES (18), (19), (20), (21), (22): Xaa is A or G
  MOD_RES (23), (24), (25), (26): Xaa is A or G or is absent

SEQ ID NO: 83288 - protein, 33 aa, Artificial Sequence; identical to SEQ ID NO: 19621
  GFR-binding peptide

SEQ ID NO: 83289 - protein, 33 aa, Artificial Sequence; identical to SEQ ID NO: 51714
  GFR-binding peptide
  MOD_RES (1), (1): Xaa is C or S
  MOD_RES (15), (16), (17), (18), (19): Xaa is A or G
  MOD_RES (20), (21), (22), (23): Xaa is A or G or is absent

SEQ ID NO: 83290 - protein, 35 aa, Artificial Sequence; identical to SEQ ID NO: 19623
  GFR-binding peptide
  MOD_RES (3), (3): Xaa is C or S

SEQ ID NO: 83291 - protein, 41 aa, Artificial Sequence; identical to SEQ ID NO: 18917
  GFR-binding peptide
  MOD_RES (4), (38), (40): Xaa is C or S

SEQ ID NO: 83292 - protein, 33 aa, Artificial Sequence; identical to SEQ ID NO: 18918
  GFR-binding peptide
  MOD_RES (14), (15), (16), (17), (18): Xaa is A or G
  MOD_RES (19), (20), (21), (22): Xaa is A or G or is absent

SEQ ID NO: 83293 - protein, 33 aa, Artificial Sequence; identical to SEQ ID NO: 51717
  GFR-binding peptide
  MOD_RES (1), (1): Xaa is C or S
  MOD_RES (15), (16), (17), (18), (19): Xaa is A or G
  MOD_RES (20), (21), (22), (23): Xaa is A or G or is absent

SEQ ID NO: 83294 - protein, 38 aa, Artificial Sequence; identical to SEQ ID NO: 55305
  GFR-binding peptide
  MOD_RES (4), (5), (36), (38): Xaa is C or S

SEQ ID NO: 83295 - protein, 38 aa, Artificial Sequence; identical to SEQ ID NO: 18919
  GFR-binding peptide
  MOD_RES (6), (6): Xaa is C or S

SEQ ID NO: 83296 - protein, 39 aa, Artificial Sequence; identical to SEQ ID NO: 55307
  GFR-binding peptide
  MOD_RES (4), (5), (38): Xaa is C or S
  MOD_RES (19), (20), (21), (22), (23): Xaa is A or G
  MOD_RES (24), (25), (26), (27): Xaa is A or G or is absent

SEQ ID NO: 83297 - protein, 34 aa, Artificial Sequence; identical to SEQ ID NO: 55312
  GFR-binding peptide
  MOD_RES (1), (2), (33): Xaa is C or S

SEQ ID NO: 83298 - protein, 34 aa, Artificial Sequence; identical to SEQ ID NO: 19625
  GFR-binding peptide
  MOD_RES (1), (1): Xaa is C or S

SEQ ID NO: 83299 - protein, 41 aa, Artificial Sequence; identical to SEQ ID NO: 18921
  GFR-binding peptide
  MOD_RES (2), (39), (41): Xaa is C or S
  MOD_RES (18), (19), (20), (21), (22): Xaa is A or G
  MOD_RES (23), (24), (25), (26): Xaa is A or G or is absent

SEQ ID NO: 83300 - protein, 35 aa, Artificial Sequence; identical to SEQ ID NO: 19626
  GFR-binding peptide
  MOD_RES (35), (35): Xaa is C or S
  MOD_RES (14), (15), (16), (17), (18): Xaa is A or G
  MOD_RES (19), (20), (21), (22): Xaa is A or G or is absent

SEQ ID NO: 83301 - protein, 44 aa, Artificial Sequence; identical to SEQ ID NO: 19628
  GFR-binding peptide
  MOD_RES (4), (41), (43): Xaa is C or S

SEQ ID NO: 83302 - protein, 39 aa, Artificial Sequence; identical to SEQ ID NO: 18923
  GFR-binding peptide
  MOD_RES (6), (6): Xaa is C or S
  MOD_RES (20), (21), (22), (23), (24): Xaa is A or G
  MOD_RES (25), (26), (27), (28): Xaa is A or G or is absent

SEQ ID NO: 83303 - protein, 39 aa, Artificial Sequence; identical to SEQ ID NO: 55314
  GFR-binding peptide
  MOD_RES (5), (6), (39): Xaa is C or S
  MOD_RES (20), (21), (22), (23), (24): Xaa is A or G
  MOD_RES (25), (26), (27), (28): Xaa is A or G or is absent

SEQ ID NO: 83304 - protein, 37 aa, Artificial Sequence; identical to SEQ ID NO: 19629
  GFR-binding peptide
  MOD_RES (5), (5): Xaa is C or S
  MOD_RES (19), (20), (21), (22), (23): Xaa is A or G
  MOD_RES (24), (25), (26), (27): Xaa is A or G or is absent

SEQ ID NO: 83305 - protein, 39 aa, Artificial Sequence; identical to SEQ ID NO: 55317
  GFR-binding peptide
  MOD_RES (5), (6), (39): Xaa is C or S
  MOD_RES (20), (21), (22), (23), (24): Xaa is A or G
  MOD_RES (25), (26), (27), (28): Xaa is A or G or is absent

SEQ ID NO: 83306 - protein, 39 aa, Artificial Sequence; identical to SEQ ID NO: 18924
  GFR-binding peptide
  MOD_RES (4), (4): Xaa is C or S

SEQ ID NO: 83307 - protein, 38 aa, Artificial Sequence; identical to SEQ ID NO: 18925
  GFR-binding peptide
  MOD_RES (36), (38): Xaa is C or S
  MOD_RES (15), (16), (17), (18), (19): Xaa is A or G
  MOD_RES (20), (21), (22), (23): Xaa is A or G or is absent

SEQ ID NO: 83308 - protein, 32 aa, Artificial Sequence; identical to SEQ ID NO: 55318
  GFR-binding peptide
  MOD_RES (31), (31): Xaa is C or S

SEQ ID NO: 83309 - protein, 41 aa, Artificial Sequence; identical to SEQ ID NO: 54125
  GFR-binding peptide
  MOD_RES (6), (7), (38), (40): Xaa is C or S

SEQ ID NO: 83310 - protein, 40 aa, Artificial Sequence; identical to SEQ ID NO: 18927
  GFR-binding peptide
  MOD_RES (5), (39): Xaa is C or S
  MOD_RES (19), (20), (21), (22), (23): Xaa is A or G
  MOD_RES (24), (25), (26), (27): Xaa is A or G or is absent

SEQ ID NO: 83311 - protein, 31 aa, Artificial Sequence; identical to SEQ ID NO: 52922
  GFR-binding peptide
  MOD_RES (31), (31): Xaa is C or S

SEQ ID NO: 83312 - protein, 36 aa, Artificial Sequence; identical to SEQ ID NO: 19631
  GFR-binding peptide
  MOD_RES (2), (36): Xaa is C or S
  MOD_RES (16), (17), (18), (19), (20): Xaa is A or G
  MOD_RES (21), (22), (23), (24): Xaa is A or G or is absent

SEQ ID NO: 83313 - protein, 42 aa, Artificial Sequence; identical to SEQ ID NO: 18928
  GFR-binding peptide
  MOD_RES (5), (39), (41): Xaa is C or S

SEQ ID NO: 83314 - protein, 41 aa, Artificial Sequence; identical to SEQ ID NO: 18929
  GFR-binding peptide
  MOD_RES (5), (39), (41): Xaa is C or S
  MOD_RES (19), (20), (21), (22), (23): Xaa is A or G
  MOD_RES (24), (25), (26), (27): Xaa is A or G or is absent

SEQ ID NO: 83315 - protein, 40 aa, Artificial Sequence; identical to SEQ ID NO: 19633
  GFR-binding peptide
  MOD_RES (4), (4): Xaa is C or S

SEQ ID NO: 83316 - protein, 38 aa, Artificial Sequence; identical to SEQ ID NO: 19635
  GFR-binding peptide
  MOD_RES (3), (3): Xaa is C or S
  MOD_RES (19), (20), (21), (22), (23): Xaa is A or G
  MOD_RES (24), (25), (26), (27): Xaa is A or G or is absent

SEQ ID NO: 83317 - protein, 40 aa, Artificial Sequence; identical to SEQ ID NO: 51733
  GFR-binding peptide
  MOD_RES (3), (4), (37), (39): Xaa is C or S
  MOD_RES (18), (19), (20), (21), (22): Xaa is A or G
  MOD_RES (23), (24), (25), (26): Xaa is A or G or is absent

SEQ ID NO: 83318 - protein, 43 aa, Artificial Sequence; identical to SEQ ID NO: 18931
  GFR-binding peptide
  MOD_RES (7), (41), (43): Xaa is C or S

SEQ ID NO: 83319 - protein, 32 aa, Artificial Sequence; identical to SEQ ID NO: 52929
  GFR-binding peptide
  MOD_RES (1), (32): Xaa is C or S

SEQ ID NO: 83320 - protein, 36 aa, Artificial Sequence; identical to SEQ ID NO: 19636
  GFR-binding peptide
  MOD_RES (34), (36): Xaa is C or S
  MOD_RES (14), (15), (16), (17), (18): Xaa is A or G
  MOD_RES (19), (20), (21), (22): Xaa is A or G or is absent

SEQ ID NO: 83321 - protein, 34 aa, Artificial Sequence; identical to SEQ ID NO: 18933
  GFR-binding peptide

SEQ ID NO: 83322 - protein, 41 aa, Artificial Sequence; identical to SEQ ID NO: 19637
  GFR-binding peptide
  MOD_RES (3), (40): Xaa is C or S

SEQ ID NO: 83323 - protein, 33 aa, Artificial Sequence; identical to SEQ ID NO: 51740
  GFR-binding peptide
  MOD_RES (1), (2), (33): Xaa is C or S

SEQ ID NO: 83324 - protein, 44 aa, Artificial Sequence; identical to SEQ ID NO: 19640
  GFR-binding peptide
  MOD_RES (5), (42), (44): Xaa is C or S
  MOD_RES (21), (22), (23), (24), (25): Xaa is A or G
  MOD_RES (26), (27), (28), (29): Xaa is A or G or is absent

SEQ ID NO: 83325 - protein, 39 aa, Artificial Sequence; identical to SEQ ID NO: 19641
  GFR-binding peptide
  MOD_RES (4), (38): Xaa is C or S
  MOD_RES (18), (19), (20), (21), (22): Xaa is A or G
  MOD_RES (23), (24), (25), (26): Xaa is A or G or is absent

SEQ ID NO: 83326 - protein, 38 aa, Artificial Sequence; identical to SEQ ID NO: 19642
  GFR-binding peptide
  MOD_RES (6), (6): Xaa is C or S

SEQ ID NO: 83327 - protein, 33 aa, Artificial Sequence; identical to SEQ ID NO: 18938
  GFR-binding peptide
  MOD_RES (14), (15), (16), (17), (18): Xaa is A or G
  MOD_RES (19), (20), (21), (22): Xaa is A or G or is absent

SEQ ID NO: 83328 - protein, 39 aa, Artificial Sequence; identical to SEQ ID NO: 19643
  GFR-binding peptide
  MOD_RES (7), (7): Xaa is C or S

SEQ ID NO: 83329 - protein, 33 aa, Artificial Sequence; identical to SEQ ID NO: 18940
  GFR-binding peptide
  MOD_RES (14), (15), (16), (17), (18): Xaa is A or G
  MOD_RES (19), (20), (21), (22): Xaa is A or G or is absent

SEQ ID NO: 83330 - protein, 34 aa, Artificial Sequence; identical to SEQ ID NO: 19645
  GFR-binding peptide
  MOD_RES (2), (2): Xaa is C or S

SEQ ID NO: 83331 - protein, 39 aa, Artificial Sequence; identical to SEQ ID NO: 52947
  GFR-binding peptide
  MOD_RES (5), (6), (39): Xaa is C or S
  MOD_RES (20), (21), (22), (23), (24): Xaa is A or G
  MOD_RES (25), (26), (27), (28): Xaa is A or G or is absent

SEQ ID NO: 83332 - protein, 38 aa, Artificial Sequence; identical to SEQ ID NO: 55351
  GFR-binding peptide
  MOD_RES (4), (5), (36), (38): Xaa is C or S

SEQ ID NO: 83333 - protein, 35 aa, Artificial Sequence; identical to SEQ ID NO: 18944
  GFR-binding peptide
  MOD_RES (2), (2): Xaa is C or S

SEQ ID NO: 83334 - protein, 35 aa, Artificial Sequence; identical to SEQ ID NO: 19647
  GFR-binding peptide
  MOD_RES (3), (3): Xaa is C or S
  MOD_RES (17), (18), (19), (20), (21): Xaa is A or G
  MOD_RES (22), (23), (24), (25): Xaa is A or G or is absent

SEQ ID NO: 83335 - protein, 38 aa, Artificial Sequence; identical to SEQ ID NO: 54152
  GFR-binding peptide
  MOD_RES (4), (5), (38): Xaa is C or S
  MOD_RES (19), (20), (21), (22), (23): Xaa is A or G
  MOD_RES (24), (25), (26), (27): Xaa is A or G or is absent

SEQ ID NO: 83336 - protein, 37 aa, Artificial Sequence; identical to SEQ ID NO: 54156
  GFR-binding peptide
  MOD_RES (6), (7): Xaa is C or S

SEQ ID NO: 83337 - protein, 36 aa, Artificial Sequence; identical to SEQ ID NO: 19650
  GFR-binding peptide
  MOD_RES (36), (36): Xaa is C or S
  MOD_RES (15), (16), (17), (18), (19): Xaa is A or G
  MOD_RES (20), (21), (22), (23): Xaa is A or G or is absent

SEQ ID NO: 83338 - protein, 36 aa, Artificial Sequence; identical to SEQ ID NO: 55359
  GFR-binding peptide
  MOD_RES (1), (34), (36): Xaa is C or S
  MOD_RES (15), (16), (17), (18), (19): Xaa is A or G
  MOD_RES (20), (21), (22), (23): Xaa is A or G or is absent

SEQ ID NO: 83339 - protein, 36 aa, Artificial Sequence; identical to SEQ ID NO: 18947
  GFR-binding peptide
  MOD_RES (2), (36): Xaa is C or S

SEQ ID NO: 83340 - protein, 42 aa, Artificial Sequence; identical to SEQ ID NO: 18948
  GFR-binding peptide
  MOD_RES (6), (40), (42): Xaa is C or S

SEQ ID NO: 83341 - protein, 37 aa, Artificial Sequence; identical to SEQ ID NO: 55361
  GFR-binding peptide
  MOD_RES (4), (5), (36): Xaa is C or S

SEQ ID NO: 83342 - protein, 38 aa, Artificial Sequence; identical to SEQ ID NO: 18949
  GFR-binding peptide
  MOD_RES (3), (37): Xaa is C or S

SEQ ID NO: 83343 - protein, 37 aa, Artificial Sequence; identical to SEQ ID NO: 18951
  GFR-binding peptide
  MOD_RES (5), (5): Xaa is C or S

SEQ ID NO: 83344 - protein, 37 aa, Artificial Sequence; identical to SEQ ID NO: 54160
  GFR-binding peptide
  MOD_RES (1), (34), (36): Xaa is C or S
  MOD_RES (15), (16), (17), (18), (19): Xaa is A or G
  MOD_RES (20), (21), (22), (23): Xaa is A or G or is absent

SEQ ID NO: 83345 - protein, 36 aa, Artificial Sequence; identical to SEQ ID NO: 19652
  GFR-binding peptide
  MOD_RES (1), (35): Xaa is C or S
  MOD_RES (15), (16), (17), (18), (19): Xaa is A or G
  MOD_RES (20), (21), (22), (23): Xaa is A or G or is absent

SEQ ID NO: 83346 - protein, 35 aa, Artificial Sequence; identical to SEQ ID NO: 18952
  GFR-binding peptide
  MOD_RES (1), (35): Xaa is C or S
  MOD_RES (15), (16), (17), (18), (19): Xaa is A or G
  MOD_RES (20), (21), (22), (23): Xaa is A or G or is absent

SEQ ID NO: 83347 - protein, 38 aa, Artificial Sequence; identical to SEQ ID NO: 54161
  GFR-binding peptide
  MOD_RES (3), (4), (35), (37): Xaa is C or S

SEQ ID NO: 83348 - protein, 37 aa, Artificial Sequence; identical to SEQ ID NO: 54162
  GFR-binding peptide
  MOD_RES (6), (7): Xaa is C or S

SEQ ID NO: 83349 - protein, 37 aa, Artificial Sequence; identical to SEQ ID NO: 19654
  GFR-binding peptide
  MOD_RES (5), (5): Xaa is C or S

SEQ ID NO: 83350 - protein, 35 aa, Artificial Sequence; identical to SEQ ID NO: 55366
  GFR-binding peptide
  MOD_RES (4), (5): Xaa is C or S

SEQ ID NO: 83351 - protein, 41 aa, Artificial Sequence; identical to SEQ ID NO: 19656
  GFR-binding peptide
  MOD_RES (6), (40): Xaa is C or S

SEQ ID NO: 83352 - protein, 35 aa, Artificial Sequence; identical to SEQ ID NO: 18954
  GFR-binding peptide
  MOD_RES (3), (3): Xaa is C or S

SEQ ID NO: 83353 - protein, 40 aa, Artificial Sequence; identical to SEQ ID NO: 52962
  GFR-binding peptide
  MOD_RES (5), (6), (37), (39): Xaa is C or S

SEQ ID NO: 83354 - protein, 43 aa, Artificial Sequence; identical to SEQ ID NO: 19660
  GFR-binding peptide
  MOD_RES (6), (40), (42): Xaa is C or S
  MOD_RES (20), (21), (22), (23), (24): Xaa is A or G
  MOD_RES (25), (26), (27), (28): Xaa is A or G or is absent

SEQ ID NO: 83355 - protein, 36 aa, Artificial Sequence; identical to SEQ ID NO: 19661
  GFR-binding peptide
  MOD_RES (1), (1): Xaa is C or S
  MOD_RES (17), (18), (19), (20), (21): Xaa is A or G
  MOD_RES (22), (23), (24), (25): Xaa is A or G or is absent

SEQ ID NO: 83356 - protein, 42 aa, Artificial Sequence; identical to SEQ ID NO: 18957
  GFR-binding peptide
  MOD_RES (6), (40), (42): Xaa is C or S
  MOD_RES (20), (21), (22), (23), (24): Xaa is A or G
  MOD_RES (25), (26), (27), (28): Xaa is A or G or is absent

SEQ ID NO: 83357 - protein, 35 aa, Artificial Sequence; identical to SEQ ID NO: 52967
  GFR-binding peptide
  MOD_RES (1), (32), (34): Xaa is C or S

SEQ ID NO: 83358 - protein, 38 aa, Artificial Sequence; identical to SEQ ID NO: 51781
  GFR-binding peptide
  MOD_RES (2), (3), (36), (38): Xaa is C or S
  MOD_RES (17), (18), (19), (20), (21): Xaa is A or G
  MOD_RES (22), (23), (24), (25): Xaa is A or G or is absent

SEQ ID NO: 83359 - protein, 33 aa, Artificial Sequence; identical to SEQ ID NO: 18960
  GFR-binding peptide
  MOD_RES (15), (16), (17), (18), (19): Xaa is A or G
  MOD_RES (20), (21), (22), (23): Xaa is A or G or is absent

SEQ ID NO: 83360 - protein, 38 aa, Artificial Sequence; identical to SEQ ID NO: 19663
  GFR-binding peptide
  MOD_RES (5), (5): Xaa is C or S
  MOD_RES (19), (20), (21), (22), (23): Xaa is A or G
  MOD_RES (24), (25), (26), (27): Xaa is A or G or is absent

SEQ ID NO: 83361 - protein, 34 aa, Artificial Sequence; identical to SEQ ID NO: 52978
  GFR-binding peptide
  MOD_RES (31), (33): Xaa is C or S

SEQ ID NO: 83362 - protein, 40 aa, Artificial Sequence; identical to SEQ ID NO: 19667
  GFR-binding peptide
  MOD_RES (5), (5): Xaa is C or S
  MOD_RES (21), (22), (23), (24), (25): Xaa is A or G
  MOD_RES (26), (27), (28), (29): Xaa is A or G or is absent

SEQ ID NO: 83363 - protein, 39 aa, Artificial Sequence; identical to SEQ ID NO: 19670
  GFR-binding peptide
  MOD_RES (3), (37), (39): Xaa is C or S
  MOD_RES (17), (18), (19), (20), (21): Xaa is A or G
  MOD_RES (22), (23), (24), (25): Xaa is A or G or is absent

SEQ ID NO: 83364 - protein, 43 aa, Artificial Sequence; identical to SEQ ID NO: 19671
  GFR-binding peptide
  MOD_RES (6), (40), (42): Xaa is C or S
  MOD_RES (20), (21), (22), (23), (24): Xaa is A or G
  MOD_RES (25), (26), (27), (28): Xaa is A or G or is absent

SEQ ID NO: 83365 - protein, 40 aa, Artificial Sequence; identical to SEQ ID NO: 18962
  GFR-binding peptide
  MOD_RES (37), (39): Xaa is C or S

SEQ ID NO: 83366 - protein, 37 aa, Artificial Sequence; identical to SEQ ID NO: 55386
  GFR-binding peptide
  MOD_RES (3), (4), (35), (37): Xaa is C or S

SEQ ID NO: 83367 - protein, 44 aa, Artificial Sequence; identical to SEQ ID NO: 19673
  GFR-binding peptide
  MOD_RES (5), (42), (44): Xaa is C or S
  MOD_RES (21), (22), (23), (24), (25): Xaa is A or G
  MOD_RES (26), (27), (28), (29): Xaa is A or G or is absent

SEQ ID NO: 83368 - protein, 38 aa, Artificial Sequence; identical to SEQ ID NO: 18965
  GFR-binding peptide
  MOD_RES (5), (5): Xaa is C or S
  MOD_RES (19), (20), (21), (22), (23): Xaa is A or G
  MOD_RES (24), (25), (26), (27): Xaa is A or G or is absent

SEQ ID NO: 83369 - protein, 35 aa, Artificial Sequence; identical to SEQ ID NO: 18967
  GFR-binding peptide
  MOD_RES (34), (34): Xaa is C or S

SEQ ID NO: 83370 - protein, 34 aa, Artificial Sequence; identical to SEQ ID NO: 51795
  GFR-binding peptide
  MOD_RES (3), (4): Xaa is C or S

SEQ ID NO: 83371 - protein, 38 aa, Artificial Sequence; identical to SEQ ID NO: 19674
  GFR-binding peptide
  MOD_RES (6), (6): Xaa is C or S
  MOD_RES (20), (21), (22), (23), (24): Xaa is A or G
  MOD_RES (25), (26), (27), (28): Xaa is A or G or is absent

SEQ ID NO: 83372 - protein, 42 aa, Artificial Sequence; identical to SEQ ID NO: 18970
  GFR-binding peptide
  MOD_RES (4), (41): Xaa is C or S
  MOD_RES (20), (21), (22), (23), (24): Xaa is A or G
  MOD_RES (25), (26), (27), (28): Xaa is A or G or is absent

SEQ ID NO: 83373 - protein, 36 aa, Artificial Sequence; identical to SEQ ID NO: 19675
  GFR-binding peptide
  MOD_RES (2), (36): Xaa is C or S
  MOD_RES (16), (17), (18), (19), (20): Xaa is A or G
  MOD_RES (21), (22), (23), (24): Xaa is A or G or is absent

SEQ ID NO: 83374 - protein, 38 aa, Artificial Sequence; identical to SEQ ID NO: 54194
  GFR-binding peptide
  MOD_RES (5), (6): Xaa is C or S
  MOD_RES (20), (21), (22), (23), (24): Xaa is A or G
  MOD_RES (25), (26), (27), (28): Xaa is A or G or is absent

SEQ ID NO: 83375 - protein, 39 aa, Artificial Sequence; identical to SEQ ID NO: 51798
  GFR-binding peptide
  MOD_RES (6), (7): Xaa is C or S
  MOD_RES (21), (22), (23), (24), (25): Xaa is A or G
  MOD_RES (26), (27), (28), (29): Xaa is A or G or is absent

SEQ ID NO: 83376 - protein, 37 aa, Artificial Sequence; identical to SEQ ID NO: 54198
  GFR-binding peptide
  MOD_RES (3), (4), (37): Xaa is C or S
  MOD_RES (18), (19), (20), (21), (22): Xaa is A or G
  MOD_RES (23), (24), (25), (26): Xaa is A or G or is absent

SEQ ID NO: 83377 - protein, 40 aa, Artificial Sequence; identical to SEQ ID NO: 19679
  GFR-binding peptide
  MOD_RES (7), (7): Xaa is C or S
  MOD_RES (21), (22), (23), (24), (25): Xaa is A or G
  MOD_RES (26), (27), (28), (29): Xaa is A or G or is absent

SEQ ID NO: 83378 - protein, 34 aa, Artificial Sequence; identical to SEQ ID NO: 55394
  GFR-binding peptide
  MOD_RES (33), (33): Xaa is C or S
  MOD_RES (14), (15), (16), (17), (18): Xaa is A or G
  MOD_RES (19), (20), (21), (22): Xaa is A or G or is absent

SEQ ID NO: 83379 - protein, 39 aa, Artificial Sequence; identical to SEQ ID NO: 52999
  GFR-binding peptide
  MOD_RES (6), (7), (38): Xaa is C or S

SEQ ID NO: 83380 - protein, 38 aa, Artificial Sequence; identical to SEQ ID NO: 55399
  GFR-binding peptide
  MOD_RES (4), (5), (36), (38): Xaa is C or S

SEQ ID NO: 83381 - protein, 36 aa, Artificial Sequence; identical to SEQ ID NO: 54205
  GFR-binding peptide
  MOD_RES (5), (6): Xaa is C or S

SEQ ID NO: 83382 - protein, 37 aa, Artificial Sequence; identical to SEQ ID NO: 53004
  GFR-binding peptide
  MOD_RES (6), (7): Xaa is C or S

SEQ ID NO: 83383 - protein, 36 aa, Artificial Sequence; identical to SEQ ID NO: 54208
  GFR-binding peptide
  MOD_RES (1), (2), (33), (35): Xaa is C or S

SEQ ID NO: 83384 - protein, 39 aa, Artificial Sequence; identical to SEQ ID NO: 18977
  GFR-binding peptide
  MOD_RES (37), (39): Xaa is C or S

SEQ ID NO: 83385 - protein, 36 aa, Artificial Sequence; identical to SEQ ID NO: 51811
  GFR-binding peptide
  MOD_RES (4), (5), (36): Xaa is C or S

SEQ ID NO: 83386 - protein, 38 aa, Artificial Sequence; identical to SEQ ID NO: 54211
  GFR-binding peptide
  MOD_RES (2), (3), (36), (38): Xaa is C or S
  MOD_RES (17), (18), (19), (20), (21): Xaa is A or G
  MOD_RES (22), (23), (24), (25): Xaa is A or G or is absent

SEQ ID NO: 83387 - protein, 39 aa, Artificial Sequence; identical to SEQ ID NO: 54212
  GFR-binding peptide
  MOD_RES (5), (6), (37), (39): Xaa is C or S

SEQ ID NO: 83388 - protein, 37 aa, Artificial Sequence; identical to SEQ ID NO: 55414
  GFR-binding peptide
  MOD_RES (2), (3), (34), (36): Xaa is C or S

SEQ ID NO: 83389 - protein, 33 aa, Artificial Sequence; identical to SEQ ID NO: 54214
  GFR-binding peptide
  MOD_RES (1), (32): Xaa is C or S

SEQ ID NO: 83390 - protein, 35 aa, Artificial Sequence; identical to SEQ ID NO: 55415
  GFR-binding peptide
  MOD_RES (1), (34): Xaa is C or S
  MOD_RES (15), (16), (17), (18), (19): Xaa is A or G
  MOD_RES (20), (21), (22), (23): Xaa is A or G or is absent

SEQ ID NO: 83391 - protein, 34 aa, Artificial Sequence; identical to SEQ ID NO: 54222
  GFR-binding peptide
  MOD_RES (2), (3), (34): Xaa is C or S

SEQ ID NO: 83392 - protein, 37 aa, Artificial Sequence; identical to SEQ ID NO: 19684
  GFR-binding peptide
  MOD_RES (37), (37): Xaa is C or S
  MOD_RES (16), (17), (18), (19), (20): Xaa is A or G
  MOD_RES (21), (22), (23), (24): Xaa is A or G or is absent

SEQ ID NO: 83393 - protein, 37 aa, Artificial Sequence; identical to SEQ ID NO: 53018
  GFR-binding peptide
  MOD_RES (1), (2), (35), (37): Xaa is C or S
  MOD_RES (16), (17), (18), (19), (20): Xaa is A or G
  MOD_RES (21), (22), (23), (24): Xaa is A or G or is absent

SEQ ID NO: 83394 - protein, 36 aa, Artificial Sequence; identical to SEQ ID NO: 19685
  GFR-binding peptide
  MOD_RES (2), (36): Xaa is C or S
  MOD_RES (16), (17), (18), (19), (20): Xaa is A or G
  MOD_RES (21), (22), (23), (24): Xaa is A or G or is absent

SEQ ID NO: 83395 - protein, 39 aa, Artificial Sequence; identical to SEQ ID NO: 18983
  GFR-binding peptide
  MOD_RES (3), (37), (39): Xaa is C or S

SEQ ID NO: 83396 - protein, 30 aa, Artificial Sequence; identical to SEQ ID NO: 53021
  GFR-binding peptide

SEQ ID NO: 83397 - protein, 41 aa, Artificial Sequence; identical to SEQ ID NO: 18984
  GFR-binding peptide
  MOD_RES (5), (5): Xaa is C or S
  MOD_RES (21), (22), (23), (24), (25): Xaa is A or G
  MOD_RES (26), (27), (28), (29): Xaa is A or G or is absent

SEQ ID NO: 83398 - protein, 39 aa, Artificial Sequence; identical to SEQ ID NO: 19694
  GFR-binding peptide
  MOD_RES (2), (39): Xaa is C or S
  MOD_RES (18), (19), (20), (21), (22): Xaa is A or G
  MOD_RES (23), (24), (25), (26): Xaa is A or G or is absent

SEQ ID NO: 83399 - protein, 34 aa, Artificial Sequence; identical to SEQ ID NO: 18986
  GFR-binding peptide
  MOD_RES (1), (1): Xaa is C or S
  MOD_RES (15), (16), (17), (18), (19): Xaa is A or G
  MOD_RES (20), (21), (22), (23): Xaa is A or G or is absent

SEQ ID NO: 83400 - protein, 37 aa, Artificial Sequence; identical to SEQ ID NO: 18987
  GFR-binding peptide
  MOD_RES (1), (1): Xaa is C or S
  MOD_RES (17), (18), (19), (20), (21): Xaa is A or G
  MOD_RES (22), (23), (24), (25): Xaa is A or G or is absent

SEQ ID NO: 83401 - protein, 34 aa, Artificial Sequence; identical to SEQ ID NO: 55437
  GFR-binding peptide
  MOD_RES (31), (33): Xaa is C or S

SEQ ID NO: 83402 - protein, 39 aa, Artificial Sequence; identical to SEQ ID NO: 51836
  GFR-binding peptide
  MOD_RES (4), (5), (36), (38): Xaa is C or S

SEQ ID NO: 83403 - protein, 36 aa, Artificial Sequence; identical to SEQ ID NO: 51840
  GFR-binding peptide
  MOD_RES (3), (4), (35): Xaa is C or S

SEQ ID NO: 83404 - protein, 35 aa, Artificial Sequence; identical to SEQ ID NO: 18990
  GFR-binding peptide
  MOD_RES (35), (35): Xaa is C or S

SEQ ID NO: 83405 - protein, 39 aa, Artificial Sequence; identical to SEQ ID NO: 53035
  GFR-binding peptide
  MOD_RES (4), (5), (36), (38): Xaa is C or S

SEQ ID NO: 83406 - protein, 44 aa, Artificial Sequence; identical to SEQ ID NO: 18993
  GFR-binding peptide
  MOD_RES (7), (41), (43): Xaa is C or S
  MOD_RES (21), (22), (23), (24), (25): Xaa is A or G
  MOD_RES (26), (27), (28), (29): Xaa is A or G or is absent

SEQ ID NO: 83407 - protein, 40 aa, Artificial Sequence; identical to SEQ ID NO: 18994
  GFR-binding peptide
  MOD_RES (3), (37), (39): Xaa is C or S
  MOD_RES (17), (18), (19), (20), (21): Xaa is A or G
  MOD_RES (22), (23), (24), (25): Xaa is A or G or is absent

SEQ ID NO: 83408 - protein, 37 aa, Artificial Sequence; identical to SEQ ID NO: 51847
  GFR-binding peptide
  MOD_RES (3), (4), (37): Xaa is C or S
  MOD_RES (18), (19), (20), (21), (22): Xaa is A or G
  MOD_RES (23), (24), (25), (26): Xaa is A or G or is absent

SEQ ID NO: 83409 - protein, 42 aa, Artificial Sequence; identical to SEQ ID NO: 19705
  GFR-binding peptide
  MOD_RES (7), (41): Xaa is C or S

SEQ ID NO: 83410 - protein, 42 aa, Artificial Sequence; identical to SEQ ID NO: 18995
  GFR-binding peptide
  MOD_RES (7), (41): Xaa is C or S

SEQ ID NO: 83411 - protein, 35 aa, Artificial Sequence; identical to SEQ ID NO: 55451
  GFR-binding peptide
  MOD_RES (1), (2), (35): Xaa is C or S
  MOD_RES (16), (17), (18), (19), (20): Xaa is A or G
  MOD_RES (21), (22), (23), (24): Xaa is A or G or is absent

SEQ ID NO: 83412 - protein, 44 aa, Artificial Sequence; identical to SEQ ID NO: 19710
  GFR-binding peptide
  MOD_RES (4), (41), (43): Xaa is C or S
  MOD_RES (20), (21), (22), (23), (24): Xaa is A or G
  MOD_RES (25), (26), (27), (28): Xaa is A or G or is absent

SEQ ID NO: 83413 - protein, 39 aa, Artificial Sequence; identical to SEQ ID NO: 51862
  GFR-binding peptide
  MOD_RES (4), (5), (38): Xaa is C or S
  MOD_RES (19), (20), (21), (22), (23): Xaa is A or G
  MOD_RES (24), (25), (26), (27): Xaa is A or G or is absent

SEQ ID NO: 83414 - protein, 39 aa, Artificial Sequence; identical to SEQ ID NO: 19713
  GFR-binding peptide
  MOD_RES (2), (39): Xaa is C or S
  MOD_RES (18), (19), (20), (21), (22): Xaa is A or G
  MOD_RES (23), (24), (25), (26): Xaa is A or G or is absent

SEQ ID NO: 83415 - protein, 36 aa, Artificial Sequence; identical to SEQ ID NO: 18997
  GFR-binding peptide
  MOD_RES (2), (36): Xaa is C or S

SEQ ID NO: 83416 - protein, 39 aa, Artificial Sequence; identical to SEQ ID NO: 19715
  GFR-binding peptide
  MOD_RES (5), (5): Xaa is C or S

SEQ ID NO: 83417 - protein, 40 aa, Artificial Sequence; identical to SEQ ID NO: 53060
  GFR-binding peptide
  MOD_RES (4), (5), (38), (40): Xaa is C or S
  MOD_RES (19), (20), (21), (22), (23): Xaa is A or G
  MOD_RES (24), (25), (26), (27): Xaa is A or G or is absent

SEQ ID NO: 83418 - protein, 37 aa, Artificial Sequence; identical to SEQ ID NO: 55463
  GFR-binding peptide
  MOD_RES (2), (3), (36): Xaa is C or S
  MOD_RES (17), (18), (19), (20), (21): Xaa is A or G
  MOD_RES (22), (23), (24), (25): Xaa is A or G or is absent

SEQ ID NO: 83419 - protein, 34 aa, Artificial Sequence; identical to SEQ ID NO: 19718
  GFR-binding peptide

SEQ ID NO: 83420 - protein, 42 aa, Artificial Sequence; identical to SEQ ID NO: 19720
  GFR-binding peptide
  MOD_RES (2), (39), (41): Xaa is C or S
  MOD_RES (18), (19), (20), (21), (22): Xaa is A or G
  MOD_RES (23), (24), (25), (26): Xaa is A or G or is absent

SEQ ID NO: 83421 - protein, 39 aa, Artificial Sequence; identical to SEQ ID NO: 18998
  GFR-binding peptide
  MOD_RES (4), (38): Xaa is C or S

SEQ ID NO: 83422 - protein, 36 aa, Artificial Sequence; identical to SEQ ID NO: 18999
  GFR-binding peptide
  MOD_RES (2), (2): Xaa is C or S
  MOD_RES (18), (19), (20), (21), (22): Xaa is A or G
  MOD_RES (23), (24), (25), (26): Xaa is A or G or is absent

SEQ ID NO: 83423 - protein, 41 aa, Artificial Sequence; identical to SEQ ID NO: 19002
  GFR-binding peptide
  MOD_RES (4), (41): Xaa is C or S
  MOD_RES (20), (21), (22), (23), (24): Xaa is A or G
  MOD_RES (25), (26), (27), (28): Xaa is A or G or is absent

SEQ ID NO: 83424 - protein, 33 aa, Artificial Sequence; identical to SEQ ID NO: 55469
  GFR-binding peptide
  MOD_RES (33), (33): Xaa is C or S
  MOD_RES (14), (15), (16), (17), (18): Xaa is A or G
  MOD_RES (19), (20), (21), (22): Xaa is A or G or is absent

SEQ ID NO: 83425 - protein, 34 aa, Artificial Sequence; identical to SEQ ID NO: 54268
  GFR-binding peptide
  MOD_RES (1), (2), (33): Xaa is C or S

SEQ ID NO: 83426 - protein, 36 aa, Artificial Sequence; identical to SEQ ID NO: 54272
  GFR-binding peptide
  MOD_RES (5), (6): Xaa is C or S

SEQ ID NO: 83427 - protein, 43 aa, Artificial Sequence; identical to SEQ ID NO: 19004
  GFR-binding peptide
  MOD_RES (6), (40), (42): Xaa is C or S

SEQ ID NO: 83428 - protein, 39 aa, Artificial Sequence; identical to SEQ ID NO: 19725
  GFR-binding peptide
  MOD_RES (1), (38): Xaa is C or S

SEQ ID NO: 83429 - protein, 37 aa, Artificial Sequence; identical to SEQ ID NO: 19726
  GFR-binding peptide
  MOD_RES (4), (4): Xaa is C or S

SEQ ID NO: 83430 - protein, 37 aa, Artificial Sequence; identical to SEQ ID NO: 54275
  GFR-binding peptide
  MOD_RES (6), (7): Xaa is C or S

SEQ ID NO: 83431 - protein, 33 aa, Artificial Sequence; identical to SEQ ID NO: 19006
  GFR-binding peptide

SEQ ID NO: 83432 - protein, 39 aa, Artificial Sequence; identical to SEQ ID NO: 19007
  GFR-binding peptide
  MOD_RES (4), (4): Xaa is C or S
  MOD_RES (20), (21), (22), (23), (24): Xaa is A or G
  MOD_RES (25), (26), (27), (28): Xaa is A or G or is absent

SEQ ID NO: 83433 - protein, 42 aa, Artificial Sequence; identical to SEQ ID NO: 19728
  GFR-binding peptide
  MOD_RES (5), (39), (41): Xaa is C or S

SEQ ID NO: 83434 - protein, 35 aa, Artificial Sequence; identical to SEQ ID NO: 54277
  GFR-binding peptide
  MOD_RES (2), (3), (34): Xaa is C or S

SEQ ID NO: 83435 - protein, 36 aa, Artificial Sequence; identical to SEQ ID NO: 19729
  GFR-binding peptide
  MOD_RES (2), (2): Xaa is C or S
  MOD_RES (18), (19), (20), (21), (22): Xaa is A or G
  MOD_RES (23), (24), (25), (26): Xaa is A or G or is absent

SEQ ID NO: 83436 - protein, 36 aa, Artificial Sequence; identical to SEQ ID NO: 19008
  GFR-binding peptide
  MOD_RES (35), (35): Xaa is C or S

SEQ ID NO: 83437 - protein, 38 aa, Artificial Sequence; identical to SEQ ID NO: 53077
  GFR-binding peptide
  MOD_RES (4), (5), (38): Xaa is C or S
  MOD_RES (19), (20), (21), (22), (23): Xaa is A or G
  MOD_RES (24), (25), (26), (27): Xaa is A or G or is absent

SEQ ID NO: 83438 - protein, 40 aa, Artificial Sequence; identical to SEQ ID NO: 19010
  GFR-binding peptide
  MOD_RES (4), (38), (40): Xaa is C or S

SEQ ID NO: 83439 - protein, 40 aa, Artificial Sequence; identical to SEQ ID NO: 19011
  GFR-binding peptide
  MOD_RES (5), (39): Xaa is C or S

SEQ ID NO: 83440 - protein, 34 aa, Artificial Sequence; identical to SEQ ID NO: 54288
  GFR-binding peptide
  MOD_RES (1), (2): Xaa is C or S
  MOD_RES (16), (17), (18), (19), (20): Xaa is A or G
  MOD_RES (21), (22), (23), (24): Xaa is A or G or is absent

SEQ ID NO: 83441 - protein, 35 aa, Artificial Sequence; identical to SEQ ID NO: 53084
  GFR-binding peptide
  MOD_RES (1), (34): Xaa is C or S
  MOD_RES (15), (16), (17), (18), (19): Xaa is A or G
  MOD_RES (20), (21), (22), (23): Xaa is A or G or is absent

SEQ ID NO: 83442 - protein, 39 aa, Artificial Sequence; identical to SEQ ID NO: 51890
  GFR-binding peptide
  MOD_RES (4), (5), (38): Xaa is C or S
  MOD_RES (19), (20), (21), (22), (23): Xaa is A or G
  MOD_RES (24), (25), (26), (27): Xaa is A or G or is absent

SEQ ID NO: 83443 - protein, 38 aa, Artificial Sequence; identical to SEQ ID NO: 55495
  GFR-binding peptide
  MOD_RES (3), (4), (37): Xaa is C or S
  MOD_RES (18), (19), (20), (21), (22): Xaa is A or G
  MOD_RES (23), (24), (25), (26): Xaa is A or G or is absent

SEQ ID NO: 83444 - protein, 38 aa, Artificial Sequence; identical to SEQ ID NO: 19740
  GFR-binding peptide
  MOD_RES (2), (36), (38): Xaa is C or S

SEQ ID NO: 83445 - protein, 38 aa, Artificial Sequence; identical to SEQ ID NO: 51896
  GFR-binding peptide
  MOD_RES (5), (6), (37): Xaa is C or S

SEQ ID NO: 83446 - protein, 39 aa, Artificial Sequence; identical to SEQ ID NO: 19014
  GFR-binding peptide
  MOD_RES (7), (7): Xaa is C or S

SEQ ID NO: 83447 - protein, 41 aa, Artificial Sequence; identical to SEQ ID NO: 51897
  GFR-binding peptide
  MOD_RES (4), (5), (38), (40): Xaa is C or S
  MOD_RES (19), (20), (21), (22), (23): Xaa is A or G
  MOD_RES (24), (25), (26), (27): Xaa is A or G or is absent

SEQ ID NO: 83448 - protein, 42 aa, Artificial Sequence; identical to SEQ ID NO: 19742
  GFR-binding peptide
  MOD_RES (3), (40), (42): Xaa is C or S
  MOD_RES (19), (20), (21), (22), (23): Xaa is A or G
  MOD_RES (24), (25), (26), (27): Xaa is A or G or is absent

SEQ ID NO: 83449 - protein, 42 aa, Artificial Sequence; identical to SEQ ID NO: 19743
  GFR-binding peptide
  MOD_RES (5), (42): Xaa is C or S

SEQ ID NO: 83450 - protein, 33 aa, Artificial Sequence; identical to SEQ ID NO: 19015
  GFR-binding peptide
  MOD_RES (15), (16), (17), (18), (19): Xaa is A or G
  MOD_RES (20), (21), (22), (23): Xaa is A or G or is absent

SEQ ID NO: 83451 - protein, 34 aa, Artificial Sequence; identical to SEQ ID NO: 51900
  GFR-binding peptide
  MOD_RES (1), (2): Xaa is C or S
  MOD_RES (16), (17), (18), (19), (20): Xaa is A or G
  MOD_RES (21), (22), (23), (24): Xaa is A or G or is absent

SEQ ID NO: 83452 - protein, 38 aa, Artificial Sequence; identical to SEQ ID NO: 19018
  GFR-binding peptide
  MOD_RES (3), (3): Xaa is C or S
  MOD_RES (19), (20), (21), (22), (23): Xaa is A or G
  MOD_RES (24), (25), (26), (27): Xaa is A or G or is absent

SEQ ID NO: 83453 - protein, 39 aa, Artificial Sequence; identical to SEQ ID NO: 19019
  GFR-binding peptide
  MOD_RES (7), (7): Xaa is C or S

SEQ ID NO: 83454 - protein, 37 aa, Artificial Sequence; identical to SEQ ID NO: 19021
  GFR-binding peptide
  MOD_RES (1), (1): Xaa is C or S
  MOD_RES (17), (18), (19), (20), (21): Xaa is A or G
  MOD_RES (22), (23), (24), (25): Xaa is A or G or is absent

SEQ ID NO: 83455 - protein, 38 aa, Artificial Sequence; identical to SEQ ID NO: 19022
  GFR-binding peptide
  MOD_RES (6), (6): Xaa is C or S

SEQ ID NO: 83456 - protein, 36 aa, Artificial Sequence; identical to SEQ ID NO: 54321
  GFR-binding peptide
  MOD_RES (2), (3), (34), (36): Xaa is C or S

SEQ ID NO: 83457 - protein, 33 aa, Artificial Sequence; identical to SEQ ID NO: 19024
  GFR-binding peptide
  MOD_RES (15), (16), (17), (18), (19): Xaa is A or G
  MOD_RES (20), (21), (22), (23): Xaa is A or G or is absent

SEQ ID NO: 83458 - protein, 37 aa, Artificial Sequence; identical to SEQ ID NO: 19026
  GFR-binding peptide
  MOD_RES (36), (36): Xaa is C or S

SEQ ID NO: 83459 - protein, 38 aa, Artificial Sequence; identical to SEQ ID NO: 19027
  GFR-binding peptide
  MOD_RES (3), (37): Xaa is C or S
  MOD_RES (17), (18), (19), (20), (21): Xaa is A or G
  MOD_RES (22), (23), (24), (25): Xaa is A or G or is absent

SEQ ID NO: 83460 - protein, 36 aa, Artificial Sequence; identical to SEQ ID NO: 19028
  GFR-binding peptide
  MOD_RES (16), (17), (18), (19), (20): Xaa is A or G
  MOD_RES (21), (22), (23), (24): Xaa is A or G or is absent

SEQ ID NO: 83461 - protein, 40 aa, Artificial Sequence; identical to SEQ ID NO: 53114
  GFR-binding peptide
  MOD_RES (4), (5), (38), (40): Xaa is C or S
  MOD_RES (19), (20), (21), (22), (23): Xaa is A or G
  MOD_RES (24), (25), (26), (27): Xaa is A or G or is absent

SEQ ID NO: 83462 - protein, 38 aa, Artificial Sequence; identical to SEQ ID NO: 19029
  GFR-binding peptide
  MOD_RES (2), (36), (38): Xaa is C or S
  MOD_RES (16), (17), (18), (19), (20): Xaa is A or G
  MOD_RES (21), (22), (23), (24): Xaa is A or G or is absent

SEQ ID NO: 83463 - protein, 38 aa, Artificial Sequence; identical to SEQ ID NO: 55519
  GFR-binding peptide
  MOD_RES (3), (4), (35), (37): Xaa is C or S

SEQ ID NO: 83464 - protein, 35 aa, Artificial Sequence; identical to SEQ ID NO: 51911
  GFR-binding peptide
  MOD_RES (4), (5): Xaa is C or S

SEQ ID NO: 83465 - protein, 36 aa, Artificial Sequence; identical to SEQ ID NO: 19030
  GFR-binding peptide
  MOD_RES (35), (35): Xaa is C or S
  MOD_RES (14), (15), (16), (17), (18): Xaa is A or G
  MOD_RES (19), (20), (21), (22): Xaa is A or G or is absent

SEQ ID NO: 83466 - protein, 36 aa, Artificial Sequence; identical to SEQ ID NO: 55522
  GFR-binding peptide
  MOD_RES (5), (6): Xaa is C or S

SEQ ID NO: 83467 - protein, 41 aa, Artificial Sequence; identical to SEQ ID NO: 19749
  GFR-binding peptide
  MOD_RES (3), (40): Xaa is C or S
  MOD_RES (19), (20), (21), (22), (23): Xaa is A or G
  MOD_RES (24), (25), (26), (27): Xaa is A or G or is absent

SEQ ID NO: 83468 - protein, 35 aa, Artificial Sequence; identical to SEQ ID NO: 54334
  GFR-binding peptide
  MOD_RES (33), (35): Xaa is C or S
  MOD_RES (14), (15), (16), (17), (18): Xaa is A or G
  MOD_RES (19), (20), (21), (22): Xaa is A or G or is absent

SEQ ID NO: 83469 - protein, 35 aa, Artificial Sequence; identical to SEQ ID NO: 19751
  GFR-binding peptide
  MOD_RES (15), (16), (17), (18), (19): Xaa is A or G
  MOD_RES (20), (21), (22), (23): Xaa is A or G or is absent

SEQ ID NO: 83470 - protein, 36 aa, Artificial Sequence; identical to SEQ ID NO: 53119
  GFR-binding peptide
  MOD_RES (1), (2), (35): Xaa is C or S
  MOD_RES (16), (17), (18), (19), (20): Xaa is A or G
  MOD_RES (21), (22), (23), (24): Xaa is A or G or is absent

SEQ ID NO: 83471 - protein, 34 aa, Artificial Sequence; identical to SEQ ID NO: 51922
  GFR-binding peptide
  MOD_RES (1), (2): Xaa is C or S
  MOD_RES (16), (17), (18), (19), (20): Xaa is A or G
  MOD_RES (21), (22), (23), (24): Xaa is A or G or is absent

SEQ ID NO: 83472 - protein, 36 aa, Artificial Sequence; identical to SEQ ID NO: 54337
  GFR-binding peptide
  MOD_RES (2), (3), (34), (36): Xaa is C or S

SEQ ID NO: 83473 - protein, 34 aa, Artificial Sequence; identical to SEQ ID NO: 54338
  GFR-binding peptide
  MOD_RES (1), (2): Xaa is C or S
  MOD_RES (16), (17), (18), (19), (20): Xaa is A or G
  MOD_RES (21), (22), (23), (24): Xaa is A or G or is absent

SEQ ID NO: 83474 - protein, 39 aa, Artificial Sequence; identical to SEQ ID NO: 19753
  GFR-binding peptide
  MOD_RES (5), (39): Xaa is C or S
  MOD_RES (19), (20), (21), (22), (23): Xaa is A or G
  MOD_RES (24), (25), (26), (27): Xaa is A or G or is absent

SEQ ID NO: 83475 - protein, 33 aa, Artificial Sequence; identical to SEQ ID NO: 53124
  GFR-binding peptide
  MOD_RES (1), (32): Xaa is C or S

SEQ ID NO: 83476 - protein, 40 aa, Artificial Sequence; identical to SEQ ID NO: 19036
  GFR-binding peptide
  MOD_RES (4), (38), (40): Xaa is C or S
  MOD_RES (18), (19), (20), (21), (22): Xaa is A or G
  MOD_RES (23), (24), (25), (26): Xaa is A or G or is absent

SEQ ID NO: 83477 - protein, 36 aa, Artificial Sequence; identical to SEQ ID NO: 19754
  GFR-binding peptide
  MOD_RES (3), (3): Xaa is C or S

SEQ ID NO: 83478 - protein, 43 aa, Artificial Sequence; identical to SEQ ID NO: 19037
  GFR-binding peptide
  MOD_RES (6), (40), (42): Xaa is C or S
  MOD_RES (20), (21), (22), (23), (24): Xaa is A or G
  MOD_RES (25), (26), (27), (28): Xaa is A or G or is absent

SEQ ID NO: 83479 - protein, 42 aa, Artificial Sequence; identical to SEQ ID NO: 19756
  GFR-binding peptide
  MOD_RES (7), (41): Xaa is C or S
  MOD_RES (21), (22), (23), (24), (25): Xaa is A or G
  MOD_RES (26), (27), (28), (29): Xaa is A or G or is absent

SEQ ID NO: 83480 - protein, 36 aa, Artificial Sequence; identical to SEQ ID NO: 19757
  GFR-binding peptide
  MOD_RES (1), (35): Xaa is C or S

SEQ ID NO: 83481 - protein, 38 aa, Artificial Sequence; identical to SEQ ID NO: 19761
  GFR-binding peptide
  MOD_RES (5), (5): Xaa is C or S

SEQ ID NO: 83482 - protein, 40 aa, Artificial Sequence; identical to SEQ ID NO: 53133
  GFR-binding peptide
  MOD_RES (6), (7), (38), (40): Xaa is C or S

SEQ ID NO: 83483 - protein, 33 aa, Artificial Sequence; identical to SEQ ID NO: 54349
  GFR-binding peptide
  MOD_RES (2), (3): Xaa is C or S

SEQ ID NO: 83484 - protein, 35 aa, Artificial Sequence; identical to SEQ ID NO: 19762
  GFR-binding peptide
  MOD_RES (34), (34): Xaa is C or S

SEQ ID NO: 83485 - protein, 39 aa, Artificial Sequence; identical to SEQ ID NO: 19763
  GFR-binding peptide
  MOD_RES (36), (38): Xaa is C or S
  MOD_RES (15), (16), (17), (18), (19): Xaa is A or G
  MOD_RES (20), (21), (22), (23): Xaa is A or G or is absent

SEQ ID NO: 83486 - protein, 40 aa, Artificial Sequence; identical to SEQ ID NO: 19042
  GFR-binding peptide
  MOD_RES (5), (5): Xaa is C or S
  MOD_RES (21), (22), (23), (24), (25): Xaa is A or G
  MOD_RES (26), (27), (28), (29): Xaa is A or G or is absent

SEQ ID NO: 83487 - protein, 37 aa, Artificial Sequence; identical to SEQ ID NO: 53139
  GFR-binding peptide
  MOD_RES (4), (5): Xaa is C or S
  MOD_RES (19), (20), (21), (22), (23): Xaa is A or G
  MOD_RES (24), (25), (26), (27): Xaa is A or G or is absent

SEQ ID NO: 83488 - protein, 37 aa, Artificial Sequence; identical to SEQ ID NO: 54353
  GFR-binding peptide
  MOD_RES (4), (5): Xaa is C or S
  MOD_RES (19), (20), (21), (22), (23): Xaa is A or G
  MOD_RES (24), (25), (26), (27): Xaa is A or G or is absent

SEQ ID NO: 83489 - protein, 32 aa, Artificial Sequence; identical to SEQ ID NO: 53140
  GFR-binding peptide
  MOD_RES (1), (2): Xaa is C or S

SEQ ID NO: 83490 - protein, 34 aa, Artificial Sequence; identical to SEQ ID NO: 51939
  GFR-binding peptide
  MOD_RES (33), (33): Xaa is C or S
  MOD_RES (14), (15), (16), (17), (18): Xaa is A or G
  MOD_RES (19), (20), (21), (22): Xaa is A or G or is absent

SEQ ID NO: 83491 - protein, 37 aa, Artificial Sequence; identical to SEQ ID NO: 19765
  GFR-binding peptide
  MOD_RES (5), (5): Xaa is C or S
  MOD_RES (19), (20), (21), (22), (23): Xaa is A or G
  MOD_RES (24), (25), (26), (27): Xaa is A or G or is absent

SEQ ID NO: 83492 - protein, 36 aa, Artificial Sequence; identical to SEQ ID NO: 53144
  GFR-binding peptide
  MOD_RES (2), (3), (36): Xaa is C or S
  MOD_RES (17), (18), (19), (20), (21): Xaa is A or G
  MOD_RES (22), (23), (24), (25): Xaa is A or G or is absent

SEQ ID NO: 83493 - protein, 39 aa, Artificial Sequence; identical to SEQ ID NO: 19766
  GFR-binding peptide
  MOD_RES (2), (36), (38): Xaa is C or S
  MOD_RES (16), (17), (18), (19), (20): Xaa is A or G
  MOD_RES (21), (22), (23), (24): Xaa is A or G or is absent

SEQ ID NO: 83494 - protein, 40 aa, Artificial Sequence; identical to SEQ ID NO: 19767
  GFR-binding peptide
  MOD_RES (7), (7): Xaa is C or S

SEQ ID NO: 83495 - protein, 39 aa, Artificial Sequence; identical to SEQ ID NO: 19045
  GFR-binding peptide
  MOD_RES (5), (39): Xaa is C or S

SEQ ID NO: 83496 - protein, 35 aa, Artificial Sequence; identical to SEQ ID NO: 19769
  GFR-binding peptide
  MOD_RES (2), (2): Xaa is C or S

SEQ ID NO: 83497 - protein, 41 aa, Artificial Sequence; identical to SEQ ID NO: 19046
  GFR-binding peptide
  MOD_RES (5), (39), (41): Xaa is C or S

SEQ ID NO: 83498 - protein, 31 aa, Artificial Sequence; identical to SEQ ID NO: 53148
  GFR-binding peptide
  MOD_RES (1), (1): Xaa is C or S

SEQ ID NO: 83499 - protein, 38 aa, Artificial Sequence; identical to SEQ ID NO: 19771
  GFR-binding peptide
  MOD_RES (4), (38): Xaa is C or S

SEQ ID NO: 83500 - protein, 38 aa, Artificial Sequence; identical to SEQ ID NO: 19773
  GFR-binding peptide
  MOD_RES (35), (37): Xaa is C or S
  MOD_RES (14), (15), (16), (17), (18): Xaa is A or G
  MOD_RES (19), (20), (21), (22): Xaa is A or G or is absent

SEQ ID NO: 83501 - protein, 35 aa, Artificial Sequence; identical to SEQ ID NO: 19774
  GFR-binding peptide
  MOD_RES (1), (1): Xaa is C or S

SEQ ID NO: 83502 - protein, 38 aa, Artificial Sequence; identical to SEQ ID NO: 19050
  GFR-binding peptide
  MOD_RES (36), (38): Xaa is C or S

SEQ ID NO: 83503 - protein, 39 aa, Artificial Sequence; identical to SEQ ID NO: 19776
  GFR-binding peptide
  MOD_RES (7), (7): Xaa is C or S
  MOD_RES (21), (22), (23), (24), (25): Xaa is A or G
  MOD_RES (26), (27), (28), (29): Xaa is A or G or is absent

SEQ ID NO: 83504 - protein, 39 aa, Artificial Sequence; identical to SEQ ID NO: 54365
  GFR-binding peptide
  MOD_RES (2), (3), (36), (38): Xaa is C or S
  MOD_RES (17), (18), (19), (20), (21): Xaa is A or G
  MOD_RES (22), (23), (24), (25): Xaa is A or G or is absent

SEQ ID NO: 83505 - protein, 36 aa, Artificial Sequence; identical to SEQ ID NO: 19777
  GFR-binding peptide
  MOD_RES (1), (35): Xaa is C or S

SEQ ID NO: 83506 - protein, 40 aa, Artificial Sequence; identical to SEQ ID NO: 19055
  GFR-binding peptide
  MOD_RES (6), (40): Xaa is C or S

SEQ ID NO: 83507 - protein, 35 aa, Artificial Sequence; identical to SEQ ID NO: 55570
  GFR-binding peptide
  MOD_RES (1), (2), (35): Xaa is C or S
  MOD_RES (16), (17), (18), (19), (20): Xaa is A or G
  MOD_RES (21), (22), (23), (24): Xaa is A or G or is absent

SEQ ID NO: 83508 - protein, 39 aa, Artificial Sequence; identical to SEQ ID NO: 19056
  GFR-binding peptide
  MOD_RES (3), (3): Xaa is C or S
  MOD_RES (19), (20), (21), (22), (23): Xaa is A or G
  MOD_RES (24), (25), (26), (27): Xaa is A or G or is absent

SEQ ID NO: 83509 - protein, 35 aa, Artificial Sequence; identical to SEQ ID NO: 19778
  GFR-binding peptide
  MOD_RES (2), (2): Xaa is C or S

SEQ ID NO: 83510 - protein, 37 aa, Artificial Sequence; identical to SEQ ID NO: 51954
  GFR-binding peptide
  MOD_RES (3), (4), (37): Xaa is C or S
  MOD_RES (18), (19), (20), (21), (22): Xaa is A or G
  MOD_RES (23), (24), (25), (26): Xaa is A or G or is absent

SEQ ID NO: 83511 - protein, 41 aa, Artificial Sequence; identical to SEQ ID NO: 53161
  GFR-binding peptide
  MOD_RES (6), (7), (40): Xaa is C or S
  MOD_RES (21), (22), (23), (24), (25): Xaa is A or G
  MOD_RES (26), (27), (28), (29): Xaa is A or G or is absent

SEQ ID NO: 83512 - protein, 30 aa, Artificial Sequence; identical to SEQ ID NO: 54369
  GFR-binding peptide

SEQ ID NO: 83513 - protein, 38 aa, Artificial Sequence; identical to SEQ ID NO: 19058
  GFR-binding peptide
  MOD_RES (2), (36), (38): Xaa is C or S

SEQ ID NO: 83514 - protein, 32 aa, Artificial Sequence; identical to SEQ ID NO: 54373
  GFR-binding peptide
  MOD_RES (1), (32): Xaa is C or S

SEQ ID NO: 83515 - protein, 43 aa, Artificial Sequence; identical to SEQ ID NO: 55572
  GFR-binding peptide
  MOD_RES (6), (7), (40), (42): Xaa is C or S
  MOD_RES (21), (22), (23), (24), (25): Xaa is A or G
  MOD_RES (26), (27), (28), (29): Xaa is A or G or is absent

SEQ ID NO: 83516 - protein, 37 aa, Artificial Sequence; identical to SEQ ID NO: 54377
  GFR-binding peptide
  MOD_RES (1), (34), (36): Xaa is C or S
  MOD_RES (15), (16), (17), (18), (19): Xaa is A or G
  MOD_RES (20), (21), (22), (23): Xaa is A or G or is absent

SEQ ID NO: 83517 - protein, 41 aa, Artificial Sequence; identical to SEQ ID NO: 54378
  GFR-binding peptide
  MOD_RES (4), (5), (38), (40): Xaa is C or S
  MOD_RES (19), (20), (21), (22), (23): Xaa is A or G
  MOD_RES (24), (25), (26), (27): Xaa is A or G or is absent

SEQ ID NO: 83518 - protein, 35 aa, Artificial Sequence; identical to SEQ ID NO: 19785
  GFR-binding peptide
  MOD_RES (3), (3): Xaa is C or S

SEQ ID NO: 83519 - protein, 32 aa, Artificial Sequence; identical to SEQ ID NO: 19788
  GFR-binding peptide
  MOD_RES (14), (15), (16), (17), (18): Xaa is A or G
  MOD_RES (19), (20), (21), (22): Xaa is A or G or is absent

SEQ ID NO: 83520 - protein, 40 aa, Artificial Sequence; identical to SEQ ID NO: 51963
  GFR-binding peptide
  MOD_RES (6), (7), (38), (40): Xaa is C or S

SEQ ID NO: 83521 - protein, 33 aa, Artificial Sequence; identical to SEQ ID NO: 54381
  GFR-binding peptide
  MOD_RES (1), (32): Xaa is C or S

SEQ ID NO: 83522 - protein, 36 aa, Artificial Sequence; identical to SEQ ID NO: 19789
  GFR-binding peptide
  MOD_RES (1), (1): Xaa is C or S

SEQ ID NO: 83523 - protein, 44 aa, Artificial Sequence; identical to SEQ ID NO: 19791
  GFR-binding peptide
  MOD_RES (4), (41), (43): Xaa is C or S
  MOD_RES (20), (21), (22), (23), (24): Xaa is A or G
  MOD_RES (25), (26), (27), (28): Xaa is A or G or is absent

SEQ ID NO: 83524 - protein, 41 aa, Artificial Sequence; identical to SEQ ID NO: 19063
  GFR-binding peptide
  MOD_RES (5), (5): Xaa is C or S
  MOD_RES (21), (22), (23), (24), (25): Xaa is A or G
  MOD_RES (26), (27), (28), (29): Xaa is A or G or is absent

SEQ ID NO: 83525 - protein, 40 aa, Artificial Sequence; identical to SEQ ID NO: 54386
  GFR-binding peptide
  MOD_RES (3), (4), (37), (39): Xaa is C or S
  MOD_RES (18), (19), (20), (21), (22): Xaa is A or G
  MOD_RES (23), (24), (25), (26): Xaa is A or G or is absent

SEQ ID NO: 83526 - protein, 37 aa, Artificial Sequence; identical to SEQ ID NO: 19064
  GFR-binding peptide
  MOD_RES (1), (35), (37): Xaa is C or S

SEQ ID NO: 83527 - protein, 45 aa, Artificial Sequence; identical to SEQ ID NO: 19066
  GFR-binding peptide
  MOD_RES (5), (42), (44): Xaa is C or S
  MOD_RES (21), (22), (23), (24), (25): Xaa is A or G
  MOD_RES (26), (27), (28), (29): Xaa is A or G or is absent

SEQ ID NO: 83528 - protein, 38 aa, Artificial Sequence; identical to SEQ ID NO: 19067
  GFR-binding peptide
  MOD_RES (35), (37): Xaa is C or S
  MOD_RES (14), (15), (16), (17), (18): Xaa is A or G
  MOD_RES (19), (20), (21), (22): Xaa is A or G or is absent

SEQ ID NO: 83529 - protein, 34 aa, Artificial Sequence; identical to SEQ ID NO: 51968
  GFR-binding peptide
  MOD_RES (33), (33): Xaa is C or S
  MOD_RES (14), (15), (16), (17), (18): Xaa is A or G
  MOD_RES (19), (20), (21), (22): Xaa is A or G or is absent

SEQ ID NO: 83530 - protein, 36 aa, Artificial Sequence; identical to SEQ ID NO: 55583
  GFR-binding peptide
  MOD_RES (3), (4): Xaa is C or S
  MOD_RES (18), (19), (20), (21), (22): Xaa is A or G
  MOD_RES (23), (24), (25), (26): Xaa is A or G or is absent

SEQ ID NO: 83531 - protein, 33 aa, Artificial Sequence; identical to SEQ ID NO: 53181
  GFR-binding peptide
  MOD_RES (1), (1): Xaa is C or S
  MOD_RES (15), (16), (17), (18), (19): Xaa is A or G
  MOD_RES (20), (21), (22), (23): Xaa is A or G or is absent

SEQ ID NO: 83532 - protein, 33 aa, Artificial Sequence; identical to SEQ ID NO: 55588
  GFR-binding peptide
  MOD_RES (1), (1): Xaa is C or S
  MOD_RES (15), (16), (17), (18), (19): Xaa is A or G
  MOD_RES (20), (21), (22), (23): Xaa is A or G or is absent

SEQ ID NO: 83533 - protein, 39 aa, Artificial Sequence; identical to SEQ ID NO: 19793
  GFR-binding peptide
  MOD_RES (2), (36), (38): Xaa is C or S
  MOD_RES (16), (17), (18), (19), (20): Xaa is A or G
  MOD_RES (21), (22), (23), (24): Xaa is A or G or is absent

SEQ ID NO: 83534 - protein, 38 aa, Artificial Sequence; identical to SEQ ID NO: 51974
  GFR-binding peptide
  MOD_RES (6), (7), (38): Xaa is C or S

SEQ ID NO: 83535 - protein, 36 aa, Artificial Sequence; identical to SEQ ID NO: 55591
  GFR-binding peptide
  MOD_RES (3), (4): Xaa is C or S
  MOD_RES (18), (19), (20), (21), (22): Xaa is A or G
  MOD_RES (23), (24), (25), (26): Xaa is A or G or is absent

SEQ ID NO: 83536 - protein, 37 aa, Artificial Sequence; identical to SEQ ID NO: 53187
  GFR-binding peptide
  MOD_RES (1), (2), (35), (37): Xaa is C or S
  MOD_RES (16), (17), (18), (19), (20): Xaa is A or G
  MOD_RES (21), (22), (23), (24): Xaa is A or G or is absent

SEQ ID NO: 83537 - protein, 40 aa, Artificial Sequence; identical to SEQ ID NO: 54400
  GFR-binding peptide
  MOD_RES (5), (6), (39): Xaa is C or S
  MOD_RES (20), (21), (22), (23), (24): Xaa is A or G
  MOD_RES (25), (26), (27), (28): Xaa is A or G or is absent

SEQ ID NO: 83538 - protein, 42 aa, Artificial Sequence; identical to SEQ ID NO: 19071
  GFR-binding peptide
  MOD_RES (7), (41): Xaa is C or S

SEQ ID NO: 83539 - protein, 39 aa, Artificial Sequence; identical to SEQ ID NO: 19795
  GFR-binding peptide
  MOD_RES (4), (4): Xaa is C or S
  MOD_RES (20), (21), (22), (23), (24): Xaa is A or G
  MOD_RES (25), (26), (27), (28): Xaa is A or G or is absent

SEQ ID NO: 83540 - protein, 41 aa, Artificial Sequence; identical to SEQ ID NO: 54404
  GFR-binding peptide
  MOD_RES (5), (6), (39), (41): Xaa is C or S
  MOD_RES (20), (21), (22), (23), (24): Xaa is A or G
  MOD_RES (25), (26), (27), (28): Xaa is A or G or is absent

SEQ ID NO: 83541 - protein, 38 aa, Artificial Sequence; identical to SEQ ID NO: 53192
  GFR-binding peptide
  MOD_RES (2), (3), (36), (38): Xaa is C or S
  MOD_RES (17), (18), (19), (20), (21): Xaa is A or G
  MOD_RES (22), (23), (24), (25): Xaa is A or G or is absent

SEQ ID NO: 83542 - protein, 38 aa, Artificial Sequence; identical to SEQ ID NO: 19075
  GFR-binding peptide
  MOD_RES (36), (38): Xaa is C or S

SEQ ID NO: 83543 - protein, 34 aa, Artificial Sequence; identical to SEQ ID NO: 19796
  GFR-binding peptide
  MOD_RES (2), (2): Xaa is C or S
  MOD_RES (16), (17), (18), (19), (20): Xaa is A or G
  MOD_RES (21), (22), (23), (24): Xaa is A or G or is absent

SEQ ID NO: 83544 - protein, 37 aa, Artificial Sequence; identical to SEQ ID NO: 53193
  GFR-binding peptide
  MOD_RES (3), (4), (37): Xaa is C or S
  MOD_RES (18), (19), (20), (21), (22): Xaa is A or G
  MOD_RES (23), (24), (25), (26): Xaa is A or G or is absent

SEQ ID NO: 83545 - protein, 35 aa, Artificial Sequence; identical to SEQ ID NO: 19797
  GFR-binding peptide
  MOD_RES (16), (17), (18), (19), (20): Xaa is A or G
  MOD_RES (21), (22), (23), (24): Xaa is A or G or is absent

SEQ ID NO: 83546 - protein, 33 aa, Artificial Sequence; identical to SEQ ID NO: 54411
  GFR-binding peptide
  MOD_RES (33), (33): Xaa is C or S
  MOD_RES (14), (15), (16), (17), (18): Xaa is A or G
  MOD_RES (19), (20), (21), (22): Xaa is A or G or is absent

SEQ ID NO: 83547 - protein, 43 aa, Artificial Sequence; identical to SEQ ID NO: 19798
  GFR-binding peptide
  MOD_RES (3), (40), (42): Xaa is C or S
  MOD_RES (19), (20), (21), (22), (23): Xaa is A or G
  MOD_RES (24), (25), (26), (27): Xaa is A or G or is absent

SEQ ID NO: 83548 - protein, 39 aa, Artificial Sequence; identical to SEQ ID NO: 54413
  GFR-binding peptide
  MOD_RES (2), (3), (36), (38): Xaa is C or S
  MOD_RES (17), (18), (19), (20), (21): Xaa is A or G
  MOD_RES (22), (23), (24), (25): Xaa is A or G or is absent

SEQ ID NO: 83549 - protein, 39 aa, Artificial Sequence; identical to SEQ ID NO: 19077
  GFR-binding peptide
  MOD_RES (2), (39): Xaa is C or S
  MOD_RES (18), (19), (20), (21), (22): Xaa is A or G
  MOD_RES (23), (24), (25), (26): Xaa is A or G or is absent

SEQ ID NO: 83550 - protein, 40 aa, Artificial Sequence; identical to SEQ ID NO: 19078
  GFR-binding peptide
  MOD_RES (6), (40): Xaa is C or S

SEQ ID NO: 83551 - protein, 37 aa, Artificial Sequence; identical to SEQ ID NO: 54414
  GFR-binding peptide
  MOD_RES (3), (4), (37): Xaa is C or S
  MOD_RES (18), (19), (20), (21), (22): Xaa is A or G
  MOD_RES (23), (24), (25), (26): Xaa is A or G or is absent

SEQ ID NO: 83552 - protein, 38 aa, Artificial Sequence; identical to SEQ ID NO: 55607
  GFR-binding peptide
  MOD_RES (3), (4), (35), (37): Xaa is C or S

SEQ ID NO: 83553 - protein, 34 aa, Artificial Sequence; identical to SEQ ID NO: 53199
  GFR-binding peptide
  MOD_RES (33), (33): Xaa is C or S
  MOD_RES (14), (15), (16), (17), (18): Xaa is A or G
  MOD_RES (19), (20), (21), (22): Xaa is A or G or is absent

SEQ ID NO: 83554 - protein, 40 aa, Artificial Sequence; identical to SEQ ID NO: 53200
  GFR-binding peptide
  MOD_RES (5), (6), (37), (39): Xaa is C or S

SEQ ID NO: 83555 - protein, 34 aa, Artificial Sequence; identical to SEQ ID NO: 55610
  GFR-binding peptide
  MOD_RES (33), (33): Xaa is C or S
  MOD_RES (14), (15), (16), (17), (18): Xaa is A or G
  MOD_RES (19), (20), (21), (22): Xaa is A or G or is absent

SEQ ID NO: 83556 - protein, 39 aa, Artificial Sequence; identical to SEQ ID NO: 19079
  GFR-binding peptide
  MOD_RES (5), (39): Xaa is C or S
  MOD_RES (19), (20), (21), (22), (23): Xaa is A or G
  MOD_RES (24), (25), (26), (27): Xaa is A or G or is absent

SEQ ID NO: 83557 - protein, 42 aa, Artificial Sequence; identical to SEQ ID NO: 19080
  GFR-binding peptide
  MOD_RES (6), (40), (42): Xaa is C or S
  MOD_RES (20), (21), (22), (23), (24): Xaa is A or G
  MOD_RES (25), (26), (27), (28): Xaa is A or G or is absent

SEQ ID NO: 83558 - protein, 41 aa, Artificial Sequence; identical to SEQ ID NO: 53204
  GFR-binding peptide
  MOD_RES (6), (7), (38), (40): Xaa is C or S

SEQ ID NO: 83559 - protein, 39 aa, Artificial Sequence; identical to SEQ ID NO: 19081
  GFR-binding peptide
  MOD_RES (36), (38): Xaa is C or S

SEQ ID NO: 83560 - protein, 40 aa, Artificial Sequence; identical to SEQ ID NO: 19801
  GFR-binding peptide
  MOD_RES (5), (39): Xaa is C or S
  MOD_RES (19), (20), (21), (22), (23): Xaa is A or G
  MOD_RES (24), (25), (26), (27): Xaa is A or G or is absent

SEQ ID NO: 83561 - protein, 36 aa, Artificial Sequence; identical to SEQ ID NO: 54424
  GFR-binding peptide
  MOD_RES (2), (3), (34), (36): Xaa is C or S

SEQ ID NO: 83562 - protein, 31 aa, Artificial Sequence; identical to SEQ ID NO: 55615
  GFR-binding peptide
  MOD_RES (1), (1): Xaa is C or S

SEQ ID NO: 83563 - protein, 42 aa, Artificial Sequence; identical to SEQ ID NO: 54426
  GFR-binding peptide
  MOD_RES (5), (6), (39), (41): Xaa is C or S
  MOD_RES (20), (21), (22), (23), (24): Xaa is A or G
  MOD_RES (25), (26), (27), (28): Xaa is A or G or is absent

SEQ ID NO: 83564 - protein, 35 aa, Artificial Sequence; identical to SEQ ID NO: 19802
  GFR-binding peptide
  MOD_RES (34), (34): Xaa is C or S
  MOD_RES (14), (15), (16), (17), (18): Xaa is A or G
  MOD_RES (19), (20), (21), (22): Xaa is A or G or is absent

SEQ ID NO: 83565 - protein, 37 aa, Artificial Sequence; identical to SEQ ID NO: 19085
  GFR-binding peptide
  MOD_RES (37), (37): Xaa is C or S
  MOD_RES (16), (17), (18), (19), (20): Xaa is A or G
  MOD_RES (21), (22), (23), (24): Xaa is A or G or is absent

SEQ ID NO: 83566 - protein, 39 aa, Artificial Sequence; identical to SEQ ID NO: 52002
  GFR-binding peptide
  MOD_RES (4), (5), (36), (38): Xaa is C or S

SEQ ID NO: 83567 - protein, 37 aa, Artificial Sequence; identical to SEQ ID NO: 19087
  GFR-binding peptide
  MOD_RES (5), (5): Xaa is C or S
  MOD_RES (19), (20), (21), (22), (23): Xaa is A or G
  MOD_RES (24), (25), (26), (27): Xaa is A or G or is absent

SEQ ID NO: 83568 - protein, 40 aa, Artificial Sequence; identical to SEQ ID NO: 19803
  GFR-binding peptide
  MOD_RES (5), (39): Xaa is C or S
  MOD_RES (19), (20), (21), (22), (23): Xaa is A or G
  MOD_RES (24), (25), (26), (27): Xaa is A or G or is absent

SEQ ID NO: 83569 - protein, 39 aa, Artificial Sequence; identical to SEQ ID NO: 19804
  GFR-binding peptide
  MOD_RES (37), (39): Xaa is C or S
  MOD_RES (16), (17), (18), (19), (20): Xaa is A or G
  MOD_RES (21), (22), (23), (24): Xaa is A or G or is absent

SEQ ID NO: 83570 - protein, 41 aa, Artificial Sequence; identical to SEQ ID NO: 55618
  GFR-binding peptide
  MOD_RES (5), (6), (39), (41): Xaa is C or S
  MOD_RES (20), (21), (22), (23), (24): Xaa is A or G
  MOD_RES (25), (26), (27), (28): Xaa is A or G or is absent

SEQ ID NO: 83571 - protein, 36 aa, Artificial Sequence; identical to SEQ ID NO: 54434
  GFR-binding peptide
  MOD_RES (2), (3), (34), (36): Xaa is C or S

SEQ ID NO: 83572 - protein, 39 aa, Artificial Sequence; identical to SEQ ID NO: 19088
  GFR-binding peptide
  MOD_RES (5), (39): Xaa is C or S

SEQ ID NO: 83573 - protein, 38 aa, Artificial Sequence; identical to SEQ ID NO: 52005
  GFR-binding peptide
  MOD_RES (1), (2), (35), (37): Xaa is C or S
  MOD_RES (16), (17), (18), (19), (20): Xaa is A or G
  MOD_RES (21), (22), (23), (24): Xaa is A or G or is absent

SEQ ID NO: 83574 - protein, 36 aa, Artificial Sequence; identical to SEQ ID NO: 19805
  GFR-binding peptide
  MOD_RES (16), (17), (18), (19), (20): Xaa is A or G
  MOD_RES (21), (22), (23), (24): Xaa is A or G or is absent

SEQ ID NO: 83575 - protein, 31 aa, Artificial Sequence; identical to SEQ ID NO: 53218
  GFR-binding peptide
  MOD_RES (31), (31): Xaa is C or S

SEQ ID NO: 83576 - protein, 36 aa, Artificial Sequence; identical to SEQ ID NO: 19806
  GFR-binding peptide
  MOD_RES (2), (36): Xaa is C or S
  MOD_RES (16), (17), (18), (19), (20): Xaa is A or G
  MOD_RES (21), (22), (23), (24): Xaa is A or G or is absent

SEQ ID NO: 83577 - protein, 39 aa, Artificial Sequence; identical to SEQ ID NO: 19807
  GFR-binding peptide
  MOD_RES (6), (6): Xaa is C or S

SEQ ID NO: 83578 - protein, 37 aa, Artificial Sequence; identical to SEQ ID NO: 19091
  GFR-binding peptide
  MOD_RES (3), (37): Xaa is C or S
  MOD_RES (17), (18), (19), (20), (21): Xaa is A or G
  MOD_RES (22), (23), (24), (25): Xaa is A or G or is absent

SEQ ID NO: 83579 - protein, 34 aa, Artificial Sequence; identical to SEQ ID NO: 19809
  GFR-binding peptide
  MOD_RES (1), (1): Xaa is C or S
  MOD_RES (15), (16), (17), (18), (19): Xaa is A or G
  MOD_RES (20), (21), (22), (23): Xaa is A or G or is absent

SEQ ID NO: 83580 - protein, 38 aa, Artificial Sequence; identical to SEQ ID NO: 19092
  GFR-binding peptide
  MOD_RES (2), (36), (38): Xaa is C or S

SEQ ID NO: 83581 - protein, 35 aa, Artificial Sequence; identical to SEQ ID NO: 19810
  GFR-binding peptide
  MOD_RES (16), (17), (18), (19), (20): Xaa is A or G
  MOD_RES (21), (22), (23), (24): Xaa is A or G or is absent

SEQ ID NO: 83582 - protein, 30 aa, Artificial Sequence; identical to SEQ ID NO: 53222
  GFR-binding peptide

SEQ ID NO: 83583 - protein, 39 aa, Artificial Sequence; identical to SEQ ID NO: 53223
  GFR-binding peptide
  MOD_RES (3), (4), (37), (39): Xaa is C or S
  MOD_RES (18), (19), (20), (21), (22): Xaa is A or G
  MOD_RES (23), (24), (25), (26): Xaa is A or G or is absent

SEQ ID NO: 83584 - protein, 34 aa, Artificial Sequence; identical to SEQ ID NO: 52015
  GFR-binding peptide
  MOD_RES (3), (4): Xaa is C or S

SEQ ID NO: 83585 - protein, 44 aa, Artificial Sequence; identical to SEQ ID NO: 19812
  GFR-binding peptide
  MOD_RES (7), (41), (43): Xaa is C or S

SEQ ID NO: 83586 - protein, 39 aa, Artificial Sequence; identical to SEQ ID NO: 19094
  GFR-binding peptide
  MOD_RES (4), (38): Xaa is C or S

SEQ ID NO: 83587 - protein, 36 aa, Artificial Sequence; identical to SEQ ID NO: 19813
  GFR-binding peptide
  MOD_RES (1), (1): Xaa is C or S

SEQ ID NO: 83588 - protein, 39 aa, Artificial Sequence; identical to SEQ ID NO: 19814
  GFR-binding peptide
  MOD_RES (37), (39): Xaa is C or S
  MOD_RES (16), (17), (18), (19), (20): Xaa is A or G
  MOD_RES (21), (22), (23), (24): Xaa is A or G or is absent

SEQ ID NO: 83589 - protein, 43 aa, Artificial Sequence; identical to SEQ ID NO: 19820
  GFR-binding peptide
  MOD_RES (4), (41), (43): Xaa is C or S
  MOD_RES (20), (21), (22), (23), (24): Xaa is A or G
  MOD_RES (25), (26), (27), (28): Xaa is A or G or is absent

SEQ ID NO: 83590 - protein, 38 aa, Artificial Sequence; identical to SEQ ID NO: 19095
  GFR-binding peptide
  MOD_RES (35), (37): Xaa is C or S

SEQ ID NO: 83591 - protein, 41 aa, Artificial Sequence; identical to SEQ ID NO: 52025
  GFR-binding peptide
  MOD_RES (5), (6), (39), (41): Xaa is C or S
  MOD_RES (20), (21), (22), (23), (24): Xaa is A or G
  MOD_RES (25), (26), (27), (28): Xaa is A or G or is absent

SEQ ID NO: 83592 - protein, 34 aa, Artificial Sequence; identical to SEQ ID NO: 53236
  GFR-binding peptide
  MOD_RES (3), (4): Xaa is C or S

SEQ ID NO: 83593 - protein, 44 aa, Artificial Sequence; identical to SEQ ID NO: 19823
  GFR-binding peptide
  MOD_RES (7), (41), (43): Xaa is C or S

SEQ ID NO: 83594 - protein, 38 aa, Artificial Sequence; identical to SEQ ID NO: 54455
  GFR-binding peptide
  MOD_RES (1), (2), (35), (37): Xaa is C or S
  MOD_RES (16), (17), (18), (19), (20): Xaa is A or G
  MOD_RES (21), (22), (23), (24): Xaa is A or G or is absent

SEQ ID NO: 83595 - protein, 39 aa, Artificial Sequence; identical to SEQ ID NO: 19824
  GFR-binding peptide
  MOD_RES (1), (38): Xaa is C or S
  MOD_RES (17), (18), (19), (20), (21): Xaa is A or G
  MOD_RES (22), (23), (24), (25): Xaa is A or G or is absent

SEQ ID NO: 83596 - protein, 32 aa, Artificial Sequence; identical to SEQ ID NO: 55641
  GFR-binding peptide
  MOD_RES (1), (2): Xaa is C or S

SEQ ID NO: 83597 - protein, 39 aa, Artificial Sequence; identical to SEQ ID NO: 53239
  GFR-binding peptide
  MOD_RES (3), (4), (37), (39): Xaa is C or S
  MOD_RES (18), (19), (20), (21), (22): Xaa is A or G
  MOD_RES (23), (24), (25), (26): Xaa is A or G or is absent

SEQ ID NO: 83598 - protein, 39 aa, Artificial Sequence; identical to SEQ ID NO: 19098
  GFR-binding peptide
  MOD_RES (6), (6): Xaa is C or S

SEQ ID NO: 83599 - protein, 34 aa, Artificial Sequence; identical to SEQ ID NO: 55643
  GFR-binding peptide
  MOD_RES (31), (33): Xaa is C or S

SEQ ID NO: 83600 - protein, 41 aa, Artificial Sequence; identical to SEQ ID NO: 19099
  GFR-binding peptide
  MOD_RES (6), (40): Xaa is C or S
  MOD_RES (20), (21), (22), (23), (24): Xaa is A or G
  MOD_RES (25), (26), (27), (28): Xaa is A or G or is absent

SEQ ID NO: 83601 - protein, 36 aa, Artificial Sequence; identical to SEQ ID NO: 19826
  GFR-binding peptide
  MOD_RES (36), (36): Xaa is C or S
  MOD_RES (15), (16), (17), (18), (19): Xaa is A or G
  MOD_RES (20), (21), (22), (23): Xaa is A or G or is absent

SEQ ID NO: 83602 - protein, 37 aa, Artificial Sequence; identical to SEQ ID NO: 52039
  GFR-binding peptide
  MOD_RES (2), (3), (36): Xaa is C or S
  MOD_RES (17), (18), (19), (20), (21): Xaa is A or G
  MOD_RES (22), (23), (24), (25): Xaa is A or G or is absent

SEQ ID NO: 83603 - protein, 38 aa, Artificial Sequence; identical to SEQ ID NO: 19827
  GFR-binding peptide
  MOD_RES (3), (37): Xaa is C or S
  MOD_RES (17), (18), (19), (20), (21): Xaa is A or G
  MOD_RES (22), (23), (24), (25): Xaa is A or G or is absent

SEQ ID NO: 83604 - protein, 43 aa, Artificial Sequence; identical to SEQ ID NO: 19828
  GFR-binding peptide
  MOD_RES (4), (41), (43): Xaa is C or S
  MOD_RES (20), (21), (22), (23), (24): Xaa is A or G
  MOD_RES (25), (26), (27), (28): Xaa is A or G or is absent

SEQ ID NO: 83605 - protein, 38 aa, Artificial Sequence; identical to SEQ ID NO: 19829
  GFR-binding peptide
  MOD_RES (4), (38): Xaa is C or S
  MOD_RES (18), (19), (20), (21), (22): Xaa is A or G
  MOD_RES (23), (24), (25), (26): Xaa is A or G or is absent

SEQ ID NO: 83606 - protein, 34 aa, Artificial Sequence; identical to SEQ ID NO: 53252
  GFR-binding peptide
  MOD_RES (2), (3), (34): Xaa is C or S

SEQ ID NO: 83607 - protein, 33 aa, Artificial Sequence; identical to SEQ ID NO: 19105
  GFR-binding peptide

SEQ ID NO: 83608 - protein, 35 aa, Artificial Sequence; identical to SEQ ID NO: 52042
  GFR-binding peptide
  MOD_RES (1), (2), (33), (35): Xaa is C or S

SEQ ID NO: 83609 - protein, 34 aa, Artificial Sequence; identical to SEQ ID NO: 19831
  GFR-binding peptide
  MOD_RES (2), (2): Xaa is C or S

SEQ ID NO: 83610 - protein, 38 aa, Artificial Sequence; identical to SEQ ID NO: 19110
  GFR-binding peptide
  MOD_RES (5), (5): Xaa is C or S
  MOD_RES (19), (20), (21), (22), (23): Xaa is A or G
  MOD_RES (24), (25), (26), (27): Xaa is A or G or is absent

SEQ ID NO: 83611 - protein, 36 aa, Artificial Sequence; identical to SEQ ID NO: 53260
  GFR-binding peptide
  MOD_RES (4), (5), (36): Xaa is C or S

SEQ ID NO: 83612 - protein, 35 aa, Artificial Sequence; identical to SEQ ID NO: 52053
  GFR-binding peptide
  MOD_RES (1), (2), (33), (35): Xaa is C or S

SEQ ID NO: 83613 - protein, 32 aa, Artificial Sequence; identical to SEQ ID NO: 19112
  GFR-binding peptide
  MOD_RES (14), (15), (16), (17), (18): Xaa is A or G
  MOD_RES (19), (20), (21), (22): Xaa is A or G or is absent

SEQ ID NO: 83614 - protein, 40 aa, Artificial Sequence; identical to SEQ ID NO: 19113
  GFR-binding peptide
  MOD_RES (6), (40): Xaa is C or S
  MOD_RES (20), (21), (22), (23), (24): Xaa is A or G
  MOD_RES (25), (26), (27), (28): Xaa is A or G or is absent

SEQ ID NO: 83615 - protein, 36 aa, Artificial Sequence; identical to SEQ ID NO: 19834
  GFR-binding peptide
  MOD_RES (2), (2): Xaa is C or S
  MOD_RES (18), (19), (20), (21), (22): Xaa is A or G
  MOD_RES (23), (24), (25), (26): Xaa is A or G or is absent

SEQ ID NO: 83616 - protein, 42 aa, Artificial Sequence; identical to SEQ ID NO: 19836
  GFR-binding peptide
  MOD_RES (6), (40), (42): Xaa is C or S
  MOD_RES (20), (21), (22), (23), (24): Xaa is A or G
  MOD_RES (25), (26), (27), (28): Xaa is A or G or is absent

SEQ ID NO: 83617 - protein, 36 aa, Artificial Sequence; identical to SEQ ID NO: 53264
  GFR-binding peptide
  MOD_RES (1), (2), (33), (35): Xaa is C or S

SEQ ID NO: 83618 - protein, 35 aa, Artificial Sequence; identical to SEQ ID NO: 19115
  GFR-binding peptide
  MOD_RES (1), (35): Xaa is C or S

SEQ ID NO: 83619 - protein, 38 aa, Artificial Sequence; identical to SEQ ID NO: 19837
  GFR-binding peptide
  MOD_RES (5), (5): Xaa is C or S

SEQ ID NO: 83620 - protein, 40 aa, Artificial Sequence; identical to SEQ ID NO: 19116
  GFR-binding peptide
  MOD_RES (6), (40): Xaa is C or S
  MOD_RES (20), (21), (22), (23), (24): Xaa is A or G
  MOD_RES (25), (26), (27), (28): Xaa is A or G or is absent

SEQ ID NO: 83621 - protein, 38 aa, Artificial Sequence; identical to SEQ ID NO: 52057
  GFR-binding peptide
  MOD_RES (4), (5), (36), (38): Xaa is C or S

SEQ ID NO: 83622 - protein, 40 aa, Artificial Sequence; identical to SEQ ID NO: 19838
  GFR-binding peptide
  MOD_RES (2), (39): Xaa is C or S
  MOD_RES (18), (19), (20), (21), (22): Xaa is A or G
  MOD_RES (23), (24), (25), (26): Xaa is A or G or is absent

SEQ ID NO: 83623 - protein, 35 aa, Artificial Sequence; identical to SEQ ID NO: 53265
  GFR-binding peptide
  MOD_RES (1), (32), (34): Xaa is C or S

SEQ ID NO: 83624 - protein, 43 aa, Artificial Sequence; identical to SEQ ID NO: 19118
  GFR-binding peptide
  MOD_RES (5), (42): Xaa is C or S
  MOD_RES (21), (22), (23), (24), (25): Xaa is A or G
  MOD_RES (26), (27), (28), (29): Xaa is A or G or is absent

SEQ ID NO: 83625 - protein, 42 aa, Artificial Sequence; identical to SEQ ID NO: 19839
  GFR-binding peptide
  MOD_RES (3), (40), (42): Xaa is C or S
  MOD_RES (19), (20), (21), (22), (23): Xaa is A or G
  MOD_RES (24), (25), (26), (27): Xaa is A or G or is absent

SEQ ID NO: 83626 - protein, 37 aa, Artificial Sequence; identical to SEQ ID NO: 54487
  GFR-binding peptide
  MOD_RES (1), (34), (36): Xaa is C or S
  MOD_RES (15), (16), (17), (18), (19): Xaa is A or G
  MOD_RES (20), (21), (22), (23): Xaa is A or G or is absent

SEQ ID NO: 83627 - protein, 41 aa, Artificial Sequence; identical to SEQ ID NO: 54488
  GFR-binding peptide
  MOD_RES (6), (7), (38), (40): Xaa is C or S

SEQ ID NO: 83628 - protein, 44 aa, Artificial Sequence; identical to SEQ ID NO: 19840
  GFR-binding peptide
  MOD_RES (5), (42), (44): Xaa is C or S
  MOD_RES (21), (22), (23), (24), (25): Xaa is A or G
  MOD_RES (26), (27), (28), (29): Xaa is A or G or is absent

SEQ ID NO: 83629 - protein, 34 aa, Artificial Sequence; identical to SEQ ID NO: 54490
  GFR-binding peptide
  MOD_RES (1), (34): Xaa is C or S
  MOD_RES (15), (16), (17), (18), (19): Xaa is A or G
  MOD_RES (20), (21), (22), (23): Xaa is A or G or is absent

SEQ ID NO: 83630 - protein, 34 aa, Artificial Sequence; identical to SEQ ID NO: 52061
  GFR-binding peptide
  MOD_RES (1), (32), (34): Xaa is C or S

SEQ ID NO: 83631 - protein, 33 aa, Artificial Sequence; identical to SEQ ID NO: 19121
  GFR-binding peptide
  MOD_RES (1), (1): Xaa is C or S
  MOD_RES (15), (16), (17), (18), (19): Xaa is A or G
  MOD_RES (20), (21), (22), (23): Xaa is A or G or is absent

SEQ ID NO: 83632 - protein, 34 aa, Artificial Sequence; identical to SEQ ID NO: 55670
  GFR-binding peptide
  MOD_RES (1), (32), (34): Xaa is C or S

SEQ ID NO: 83633 - protein, 33 aa, Artificial Sequence; identical to SEQ ID NO: 19123
  GFR-binding peptide
  MOD_RES (15), (16), (17), (18), (19): Xaa is A or G
  MOD_RES (20), (21), (22), (23): Xaa is A or G or is absent

SEQ ID NO: 83634 - protein, 37 aa, Artificial Sequence; identical to SEQ ID NO: 19125
  GFR-binding peptide
  MOD_RES (5), (5): Xaa is C or S

SEQ ID NO: 83635 - protein, 34 aa, Artificial Sequence; identical to SEQ ID NO: 55673
  GFR-binding peptide
  MOD_RES (1), (34): Xaa is C or S
  MOD_RES (15), (16), (17), (18), (19): Xaa is A or G
  MOD_RES (20), (21), (22), (23): Xaa is A or G or is absent

SEQ ID NO: 83636 - protein, 40 aa, Artificial Sequence; identical to SEQ ID NO: 19126
  GFR-binding peptide
  MOD_RES (3), (37), (39): Xaa is C or S
  MOD_RES (17), (18), (19), (20), (21): Xaa is A or G
  MOD_RES (22), (23), (24), (25): Xaa is A or G or is absent

SEQ ID NO: 83637 - protein, 40 aa, Artificial Sequence; identical to SEQ ID NO: 54501
  GFR-binding peptide
  MOD_RES (6), (7), (40): Xaa is C or S
  MOD_RES (21), (22), (23), (24), (25): Xaa is A or G
  MOD_RES (26), (27), (28), (29): Xaa is A or G or is absent

SEQ ID NO: 83638 - protein, 38 aa, Artificial Sequence; identical to SEQ ID NO: 19843
  GFR-binding peptide
  MOD_RES (6), (6): Xaa is C or S
  MOD_RES (20), (21), (22), (23), (24): Xaa is A or G
  MOD_RES (25), (26), (27), (28): Xaa is A or G or is absent

SEQ ID NO: 83639 - protein, 39 aa, Artificial Sequence; identical to SEQ ID NO: 19845
  GFR-binding peptide
  MOD_RES (2), (36), (38): Xaa is C or S
  MOD_RES (16), (17), (18), (19), (20): Xaa is A or G
  MOD_RES (21), (22), (23), (24): Xaa is A or G or is absent

SEQ ID NO: 83640 - protein, 35 aa, Artificial Sequence; identical to SEQ ID NO: 19846
  GFR-binding peptide
  MOD_RES (3), (3): Xaa is C or S
  MOD_RES (17), (18), (19), (20), (21): Xaa is A or G
  MOD_RES (22), (23), (24), (25): Xaa is A or G or is absent

SEQ ID NO: 83641 - protein, 39 aa, Artificial Sequence; identical to SEQ ID NO: 52078
  GFR-binding peptide
  MOD_RES (6), (7): Xaa is C or S
  MOD_RES (21), (22), (23), (24), (25): Xaa is A or G
  MOD_RES (26), (27), (28), (29): Xaa is A or G or is absent

SEQ ID NO: 83642 - protein, 34 aa, Artificial Sequence; identical to SEQ ID NO: 19848
  GFR-binding peptide
  MOD_RES (1), (1): Xaa is C or S

SEQ ID NO: 83643 - protein, 39 aa, Artificial Sequence; identical to SEQ ID NO: 19849
  GFR-binding peptide
  MOD_RES (3), (3): Xaa is C or S

SEQ ID NO: 83644 - protein, 42 aa, Artificial Sequence; identical to SEQ ID NO: 19132
  GFR-binding peptide
  MOD_RES (4), (41): Xaa is C or S
  MOD_RES (20), (21), (22), (23), (24): Xaa is A or G
  MOD_RES (25), (26), (27), (28): Xaa is A or G or is absent

SEQ ID NO: 83645 - protein, 36 aa, Artificial Sequence; identical to SEQ ID NO: 19134
  GFR-binding peptide
  MOD_RES (4), (4): Xaa is C or S

SEQ ID NO: 83646 - protein, 42 aa, Artificial Sequence; identical to SEQ ID NO: 19853
  GFR-binding peptide
  MOD_RES (3), (40), (42): Xaa is C or S
  MOD_RES (19), (20), (21), (22), (23): Xaa is A or G
  MOD_RES (24), (25), (26), (27): Xaa is A or G or is absent

SEQ ID NO: 83647 - protein, 37 aa, Artificial Sequence; identical to SEQ ID NO: 19854
  GFR-binding peptide
  MOD_RES (37), (37): Xaa is C or S

SEQ ID NO: 83648 - protein, 36 aa, Artificial Sequence; identical to SEQ ID NO: 19855
  GFR-binding peptide
  MOD_RES (1), (35): Xaa is C or S

SEQ ID NO: 83649 - protein, 39 aa, Artificial Sequence; identical to SEQ ID NO: 19856
  GFR-binding peptide
  MOD_RES (1), (38): Xaa is C or S
  MOD_RES (17), (18), (19), (20), (21): Xaa is A or G
  MOD_RES (22), (23), (24), (25): Xaa is A or G or is absent

SEQ ID NO: 83650 - protein, 40 aa, Artificial Sequence; identical to SEQ ID NO: 52094
  GFR-binding peptide
  MOD_RES (5), (6), (37), (39): Xaa is C or S

SEQ ID NO: 83651 - protein, 35 aa, Artificial Sequence; identical to SEQ ID NO: 19857
  GFR-binding peptide
  MOD_RES (2), (2): Xaa is C or S
  MOD_RES (16), (17), (18), (19), (20): Xaa is A or G
  MOD_RES (21), (22), (23), (24): Xaa is A or G or is absent

SEQ ID NO: 83652 - protein, 40 aa, Artificial Sequence; identical to SEQ ID NO: 19860
  GFR-binding peptide
  MOD_RES (3), (40): Xaa is C or S

SEQ ID NO: 83653 - protein, 37 aa, Artificial Sequence; identical to SEQ ID NO: 19136
  GFR-binding peptide
  MOD_RES (1), (35), (37): Xaa is C or S

SEQ ID NO: 83654 - protein, 39 aa, Artificial Sequence; identical to SEQ ID NO: 54517
  GFR-binding peptide
  MOD_RES (2), (3), (36), (38): Xaa is C or S
  MOD_RES (17), (18), (19), (20), (21): Xaa is A or G
  MOD_RES (22), (23), (24), (25): Xaa is A or G or is absent

SEQ ID NO: 83655 - protein, 33 aa, Artificial Sequence; identical to SEQ ID NO: 55685
  GFR-binding peptide
  MOD_RES (33), (33): Xaa is C or S
  MOD_RES (14), (15), (16), (17), (18): Xaa is A or G
  MOD_RES (19), (20), (21), (22): Xaa is A or G or is absent

SEQ ID NO: 83656 - protein, 35 aa, Artificial Sequence; identical to SEQ ID NO: 54519
  GFR-binding peptide
  MOD_RES (1), (32), (34): Xaa is C or S

SEQ ID NO: 83657 - protein, 38 aa, Artificial Sequence; identical to SEQ ID NO: 54520
  GFR-binding peptide
  MOD_RES (5), (6): Xaa is C or S
  MOD_RES (20), (21), (22), (23), (24): Xaa is A or G
  MOD_RES (25), (26), (27), (28): Xaa is A or G or is absent

SEQ ID NO: 83658 - protein, 36 aa, Artificial Sequence; identical to SEQ ID NO: 19861
  GFR-binding peptide
  MOD_RES (2), (2): Xaa is C or S

SEQ ID NO: 83659 - protein, 36 aa, Artificial Sequence; identical to SEQ ID NO: 54525
  GFR-binding peptide
  MOD_RES (1), (34), (36): Xaa is C or S
  MOD_RES (15), (16), (17), (18), (19): Xaa is A or G
  MOD_RES (20), (21), (22), (23): Xaa is A or G or is absent

SEQ ID NO: 83660 - protein, 33 aa, Artificial Sequence; identical to SEQ ID NO: 55691
  GFR-binding peptide
  MOD_RES (31), (33): Xaa is C or S

SEQ ID NO: 83661 - protein, 37 aa, Artificial Sequence; identical to SEQ ID NO: 53303
  GFR-binding peptide
  MOD_RES (1), (34), (36): Xaa is C or S
  MOD_RES (15), (16), (17), (18), (19): Xaa is A or G
  MOD_RES (20), (21), (22), (23): Xaa is A or G or is absent

SEQ ID NO: 83662 - protein, 43 aa, Artificial Sequence; identical to SEQ ID NO: 19865
  GFR-binding peptide
  MOD_RES (7), (41), (43): Xaa is C or S

SEQ ID NO: 83663 - protein, 36 aa, Artificial Sequence; identical to SEQ ID NO: 19141
  GFR-binding peptide
  MOD_RES (4), (4): Xaa is C or S

SEQ ID NO: 83664 - protein, 44 aa, Artificial Sequence; identical to SEQ ID NO: 19868
  GFR-binding peptide
  MOD_RES (7), (41), (43): Xaa is C or S
  MOD_RES (21), (22), (23), (24), (25): Xaa is A or G
  MOD_RES (26), (27), (28), (29): Xaa is A or G or is absent

SEQ ID NO: 83665 - protein, 40 aa, Artificial Sequence; identical to SEQ ID NO: 53304
  GFR-binding peptide
  MOD_RES (6), (7), (38), (40): Xaa is C or S

SEQ ID NO: 83666 - protein, 37 aa, Artificial Sequence; identical to SEQ ID NO: 53305
  GFR-binding peptide
  MOD_RES (1), (2), (35), (37): Xaa is C or S
  MOD_RES (16), (17), (18), (19), (20): Xaa is A or G
  MOD_RES (21), (22), (23), (24): Xaa is A or G or is absent

SEQ ID NO: 83667 - protein, 36 aa, Artificial Sequence; identical to SEQ ID NO: 52108
  GFR-binding peptide
  MOD_RES (4), (5), (36): Xaa is C or S

SEQ ID NO: 83668 - protein, 34 aa, Artificial Sequence; identical to SEQ ID NO: 54530
  GFR-binding peptide
  MOD_RES (31), (33): Xaa is C or S

SEQ ID NO: 83669 - protein, 35 aa, Artificial Sequence; identical to SEQ ID NO: 19143
  GFR-binding peptide
  MOD_RES (34), (34): Xaa is C or S
  MOD_RES (14), (15), (16), (17), (18): Xaa is A or G
  MOD_RES (19), (20), (21), (22): Xaa is A or G or is absent

SEQ ID NO: 83670 - protein, 33 aa, Artificial Sequence; identical to SEQ ID NO: 53310
  GFR-binding peptide
  MOD_RES (1), (1): Xaa is C or S
  MOD_RES (15), (16), (17), (18), (19): Xaa is A or G
  MOD_RES (20), (21), (22), (23): Xaa is A or G or is absent

SEQ ID NO: 83671 - protein, 31 aa, Artificial Sequence; identical to SEQ ID NO: 54534
  GFR-binding peptide
  MOD_RES (31), (31): Xaa is C or S

SEQ ID NO: 83672 - protein, 34 aa, Artificial Sequence; identical to SEQ ID NO: 19871
  GFR-binding peptide
  MOD_RES (14), (15), (16), (17), (18): Xaa is A or G
  MOD_RES (19), (20), (21), (22): Xaa is A or G or is absent

SEQ ID NO: 83673 - protein, 33 aa, Artificial Sequence; identical to SEQ ID NO: 19872
  GFR-binding peptide

SEQ ID NO: 83674 - protein, 43 aa, Artificial Sequence; identical to SEQ ID NO: 19148
  GFR-binding peptide
  MOD_RES (5), (42): Xaa is C or S

SEQ ID NO: 83675 - protein, 37 aa, Artificial Sequence; identical to SEQ ID NO: 19149
  GFR-binding peptide
  MOD_RES (4), (4): Xaa is C or S

SEQ ID NO: 83676 - protein, 31 aa, Artificial Sequence; identical to SEQ ID NO: 53320
  GFR-binding peptide
  MOD_RES (1), (1): Xaa is C or S

SEQ ID NO: 83677 - protein, 37 aa, Artificial Sequence; identical to SEQ ID NO: 19150
  GFR-binding peptide
  MOD_RES (1), (35), (37): Xaa is C or S

SEQ ID NO: 83678 - protein, 40 aa, Artificial Sequence; identical to SEQ ID NO: 53321
  GFR-binding peptide
  MOD_RES (3), (4), (37), (39): Xaa is C or S
  MOD_RES (18), (19), (20), (21), (22): Xaa is A or G
  MOD_RES (23), (24), (25), (26): Xaa is A or G or is absent

SEQ ID NO: 83679 - protein, 43 aa, Artificial Sequence; identical to SEQ ID NO: 19876
  GFR-binding peptide
  MOD_RES (4), (41), (43): Xaa is C or S
  MOD_RES (20), (21), (22), (23), (24): Xaa is A or G
  MOD_RES (25), (26), (27), (28): Xaa is A or G or is absent

SEQ ID NO: 83680 - protein, 41 aa, Artificial Sequence; identical to SEQ ID NO: 19877
  GFR-binding peptide
  MOD_RES (5), (39), (41): Xaa is C or S
  MOD_RES (19), (20), (21), (22), (23): Xaa is A or G
  MOD_RES (24), (25), (26), (27): Xaa is A or G or is absent

SEQ ID NO: 83681 - protein, 38 aa, Artificial Sequence; identical to SEQ ID NO: 53322
  GFR-binding peptide
  MOD_RES (3), (4), (37): Xaa is C or S
  MOD_RES (18), (19), (20), (21), (22): Xaa is A or G
  MOD_RES (23), (24), (25), (26): Xaa is A or G or is absent

SEQ ID NO: 83682 - protein, 35 aa, Artificial Sequence; identical to SEQ ID NO: 19155
  GFR-binding peptide
  MOD_RES (1), (35): Xaa is C or S
  MOD_RES (15), (16), (17), (18), (19): Xaa is A or G
  MOD_RES (20), (21), (22), (23): Xaa is A or G or is absent

SEQ ID NO: 83683 - protein, 44 aa, Artificial Sequence; identical to SEQ ID NO: 19156
  GFR-binding peptide
  MOD_RES (7), (41), (43): Xaa is C or S

SEQ ID NO: 83684 - protein, 33 aa, Artificial Sequence; identical to SEQ ID NO: 54550
  GFR-binding peptide
  MOD_RES (31), (33): Xaa is C or S

SEQ ID NO: 83685 - protein, 39 aa, Artificial Sequence; identical to SEQ ID NO: 19158
  GFR-binding peptide
  MOD_RES (2), (36), (38): Xaa is C or S
  MOD_RES (16), (17), (18), (19), (20): Xaa is A or G
  MOD_RES (21), (22), (23), (24): Xaa is A or G or is absent

SEQ ID NO: 83686 - protein, 36 aa, Artificial Sequence; identical to SEQ ID NO: 19159
  GFR-binding peptide
  MOD_RES (35), (35): Xaa is C or S
  MOD_RES (14), (15), (16), (17), (18): Xaa is A or G
  MOD_RES (19), (20), (21), (22): Xaa is A or G or is absent

SEQ ID NO: 83687 - protein, 40 aa, Artificial Sequence; identical to SEQ ID NO: 19880
  GFR-binding peptide
  MOD_RES (7), (7): Xaa is C or S

SEQ ID NO: 83688 - protein, 35 aa, Artificial Sequence; identical to SEQ ID NO: 53329
  GFR-binding peptide
  MOD_RES (33), (35): Xaa is C or S
  MOD_RES (14), (15), (16), (17), (18): Xaa is A or G
  MOD_RES (19), (20), (21), (22): Xaa is A or G or is absent

SEQ ID NO: 83689 - protein, 35 aa, Artificial Sequence; identical to SEQ ID NO: 19162
  GFR-binding peptide
  MOD_RES (1), (35): Xaa is C or S

SEQ ID NO: 83690 - protein, 43 aa, Artificial Sequence; identical to SEQ ID NO: 52134
  GFR-binding peptide
  MOD_RES (6), (7), (40), (42): Xaa is C or S
  MOD_RES (21), (22), (23), (24), (25): Xaa is A or G
  MOD_RES (26), (27), (28), (29): Xaa is A or G or is absent

SEQ ID NO: 83691 - protein, 37 aa, Artificial Sequence; identical to SEQ ID NO: 19163
  GFR-binding peptide
  MOD_RES (37), (37): Xaa is C or S

SEQ ID NO: 83692 - protein, 33 aa, Artificial Sequence; identical to SEQ ID NO: 52139
  GFR-binding peptide
  MOD_RES (31), (33): Xaa is C or S

SEQ ID NO: 83693 - protein, 37 aa, Artificial Sequence; identical to SEQ ID NO: 19881
  GFR-binding peptide
  MOD_RES (36), (36): Xaa is C or S
  MOD_RES (15), (16), (17), (18), (19): Xaa is A or G
  MOD_RES (20), (21), (22), (23): Xaa is A or G or is absent

SEQ ID NO: 83694 - protein, 36 aa, Artificial Sequence; identical to SEQ ID NO: 19882
  GFR-binding peptide

SEQ ID NO: 83695 - protein, 40 aa, Artificial Sequence; identical to SEQ ID NO: 19165
  GFR-binding peptide
  MOD_RES (3), (40): Xaa is C or S
  MOD_RES (19), (20), (21), (22), (23): Xaa is A or G
  MOD_RES (24), (25), (26), (27): Xaa is A or G or is absent

SEQ ID NO: 83696 - protein, 35 aa, Artificial Sequence; identical to SEQ ID NO: 19886
  GFR-binding peptide
  MOD_RES (3), (3): Xaa is C or S
  MOD_RES (17), (18), (19), (20), (21): Xaa is A or G
  MOD_RES (22), (23), (24), (25): Xaa is A or G or is absent

SEQ ID NO: 83697 - protein, 34 aa, Artificial Sequence; identical to SEQ ID NO: 19888
  GFR-binding peptide
  MOD_RES (14), (15), (16), (17), (18): Xaa is A or G
  MOD_RES (19), (20), (21), (22): Xaa is A or G or is absent

SEQ ID NO: 83698 - protein, 39 aa, Artificial Sequence; identical to SEQ ID NO: 53338
  GFR-binding peptide
  MOD_RES (4), (5), (36), (38): Xaa is C or S

SEQ ID NO: 83699 - protein, 40 aa, Artificial Sequence; identical to SEQ ID NO: 19166
  GFR-binding peptide
  MOD_RES (1), (38), (40): Xaa is C or S

SEQ ID NO: 83700 - protein, 38 aa, Artificial Sequence; identical to SEQ ID NO: 19889
  GFR-binding peptide
  MOD_RES (3), (3): Xaa is C or S
  MOD_RES (19), (20), (21), (22), (23): Xaa is A or G
  MOD_RES (24), (25), (26), (27): Xaa is A or G or is absent

SEQ ID NO: 83701 - protein, 38 aa, Artificial Sequence; identical to SEQ ID NO: 55724
  GFR-binding peptide
  MOD_RES (1), (2), (35), (37): Xaa is C or S
  MOD_RES (16), (17), (18), (19), (20): Xaa is A or G
  MOD_RES (21), (22), (23), (24): Xaa is A or G or is absent

SEQ ID NO: 83702 - protein, 31 aa, Artificial Sequence; identical to SEQ ID NO: 52145
  GFR-binding peptide
  MOD_RES (31), (31): Xaa is C or S

SEQ ID NO: 83703 - protein, 39 aa, Artificial Sequence; identical to SEQ ID NO: 53344
  GFR-binding peptide
  MOD_RES (5), (6), (39): Xaa is C or S
  MOD_RES (20), (21), (22), (23), (24): Xaa is A or G
  MOD_RES (25), (26), (27), (28): Xaa is A or G or is absent

SEQ ID NO: 83704 - protein, 36 aa, Artificial Sequence; identical to SEQ ID NO: 19168
  GFR-binding peptide
  MOD_RES (3), (3): Xaa is C or S
  MOD_RES (17), (18), (19), (20), (21): Xaa is A or G
  MOD_RES (22), (23), (24), (25): Xaa is A or G or is absent

SEQ ID NO: 83705 - protein, 33 aa, Artificial Sequence; identical to SEQ ID NO: 19169
  GFR-binding peptide
  MOD_RES (1), (1): Xaa is C or S
  MOD_RES (15), (16), (17), (18), (19): Xaa is A or G
  MOD_RES (20), (21), (22), (23): Xaa is A or G or is absent

SEQ ID NO: 83706 - protein, 37 aa, Artificial Sequence; identical to SEQ ID NO: 52147
  GFR-binding peptide
  MOD_RES (5), (6), (37): Xaa is C or S

SEQ ID NO: 83707 - protein, 41 aa, Artificial Sequence; identical to SEQ ID NO: 52149
  GFR-binding peptide
  MOD_RES (6), (7), (38), (40): Xaa is C or S

SEQ ID NO: 83708 - protein, 40 aa, Artificial Sequence; identical to SEQ ID NO: 55725
  GFR-binding peptide
  MOD_RES (6), (7), (40): Xaa is C or S
  MOD_RES (21), (22), (23), (24), (25): Xaa is A or G
  MOD_RES (26), (27), (28), (29): Xaa is A or G or is absent

SEQ ID NO: 83709 - protein, 45 aa, Artificial Sequence; identical to SEQ ID NO: 19170
  GFR-binding peptide
  MOD_RES (5), (42), (44): Xaa is C or S
  MOD_RES (21), (22), (23), (24), (25): Xaa is A or G
  MOD_RES (26), (27), (28), (29): Xaa is A or G or is absent

SEQ ID NO: 83710 - protein, 38 aa, Artificial Sequence; identical to SEQ ID NO: 19890
  GFR-binding peptide
  MOD_RES (3), (3): Xaa is C or S

SEQ ID NO: 83711 - protein, 40 aa, Artificial Sequence; identical to SEQ ID NO: 19891
  GFR-binding peptide
  MOD_RES (37), (39): Xaa is C or S
  MOD_RES (16), (17), (18), (19), (20): Xaa is A or G
  MOD_RES (21), (22), (23), (24): Xaa is A or G or is absent

SEQ ID NO: 83712 - protein, 44 aa, Artificial Sequence; identical to SEQ ID NO: 19892
  GFR-binding peptide
  MOD_RES (5), (42), (44): Xaa is C or S
  MOD_RES (21), (22), (23), (24), (25): Xaa is A or G
  MOD_RES (26), (27), (28), (29): Xaa is A or G or is absent

SEQ ID NO: 83713 - protein, 34 aa, Artificial Sequence; identical to SEQ ID NO: 55733
  GFR-binding peptide
  MOD_RES (1), (2): Xaa is C or S
  MOD_RES (16), (17), (18), (19), (20): Xaa is A or G
  MOD_RES (21), (22), (23), (24): Xaa is A or G or is absent

SEQ ID NO: 83714 - protein, 38 aa, Artificial Sequence; identical to SEQ ID NO: 19173
  GFR-binding peptide
  MOD_RES (37), (37): Xaa is C or S
  MOD_RES (16), (17), (18), (19), (20): Xaa is A or G
  MOD_RES (21), (22), (23), (24): Xaa is A or G or is absent

SEQ ID NO: 83715 - protein, 40 aa, Artificial Sequence; identical to SEQ ID NO: 19895
  GFR-binding peptide
  MOD_RES (2), (39): Xaa is C or S

SEQ ID NO: 83716 - protein, 42 aa, Artificial Sequence; identical to SEQ ID NO: 54572
  GFR-binding peptide
  MOD_RES (5), (6), (39), (41): Xaa is C or S
  MOD_RES (20), (21), (22), (23), (24): Xaa is A or G
  MOD_RES (25), (26), (27), (28): Xaa is A or G or is absent

SEQ ID NO: 83717 - protein, 37 aa, Artificial Sequence; identical to SEQ ID NO: 53355
  GFR-binding peptide
  MOD_RES (2), (3), (34), (36): Xaa is C or S

SEQ ID NO: 83718 - protein, 36 aa, Artificial Sequence; identical to SEQ ID NO: 53359
  GFR-binding peptide
  MOD_RES (2), (3), (36): Xaa is C or S
  MOD_RES (17), (18), (19), (20), (21): Xaa is A or G
  MOD_RES (22), (23), (24), (25): Xaa is A or G or is absent

SEQ ID NO: 83719 - protein, 35 aa, Artificial Sequence; identical to SEQ ID NO: 52161
  GFR-binding peptide
  MOD_RES (1), (34): Xaa is C or S
  MOD_RES (15), (16), (17), (18), (19): Xaa is A or G
  MOD_RES (20), (21), (22), (23): Xaa is A or G or is absent

SEQ ID NO: 83720 - protein, 37 aa, Artificial Sequence; identical to SEQ ID NO: 19174
  GFR-binding peptide
  MOD_RES (2), (2): Xaa is C or S
  MOD_RES (18), (19), (20), (21), (22): Xaa is A or G
  MOD_RES (23), (24), (25), (26): Xaa is A or G or is absent

SEQ ID NO: 83721 - protein, 38 aa, Artificial Sequence; identical to SEQ ID NO: 19176
  GFR-binding peptide
  MOD_RES (2), (2): Xaa is C or S
  MOD_RES (18), (19), (20), (21), (22): Xaa is A or G
  MOD_RES (23), (24), (25), (26): Xaa is A or G or is absent

SEQ ID NO: 83722 - protein, 38 aa, Artificial Sequence; identical to SEQ ID NO: 19177
  GFR-binding peptide
  MOD_RES (4), (4): Xaa is C or S

SEQ ID NO: 83723 - protein, 37 aa, Artificial Sequence; identical to SEQ ID NO: 19898
  GFR-binding peptide
  MOD_RES (1), (35), (37): Xaa is C or S
  MOD_RES (15), (16), (17), (18), (19): Xaa is A or G
  MOD_RES (20), (21), (22), (23): Xaa is A or G or is absent

SEQ ID NO: 83724 - protein, 43 aa, Artificial Sequence; identical to SEQ ID NO: 19899
  GFR-binding peptide
  MOD_RES (3), (40), (42): Xaa is C or S

SEQ ID NO: 83725 - protein, 40 aa, Artificial Sequence; identical to SEQ ID NO: 19180
  GFR-binding peptide
  MOD_RES (3), (37), (39): Xaa is C or S

SEQ ID NO: 83726 - protein, 38 aa, Artificial Sequence; identical to SEQ ID NO: 52174
  GFR-binding peptide
  MOD_RES (4), (5), (38): Xaa is C or S
  MOD_RES (19), (20), (21), (22), (23): Xaa is A or G
  MOD_RES (24), (25), (26), (27): Xaa is A or G or is absent

SEQ ID NO: 83727 - protein, 41 aa, Artificial Sequence; identical to SEQ ID NO: 19183
  GFR-binding peptide
  MOD_RES (4), (41): Xaa is C or S
  MOD_RES (20), (21), (22), (23), (24): Xaa is A or G
  MOD_RES (25), (26), (27), (28): Xaa is A or G or is absent

SEQ ID NO: 83728 - protein, 35 aa, Artificial Sequence; identical to SEQ ID NO: 55747
  GFR-binding peptide
  MOD_RES (3), (4), (35): Xaa is C or S

SEQ ID NO: 83729 - protein, 37 aa, Artificial Sequence; identical to SEQ ID NO: 55748
  GFR-binding peptide
  MOD_RES (3), (4), (35), (37): Xaa is C or S

SEQ ID NO: 83730 - protein, 38 aa, Artificial Sequence; identical to SEQ ID NO: 19900
  GFR-binding peptide
  MOD_RES (6), (6): Xaa is C or S
  MOD_RES (20), (21), (22), (23), (24): Xaa is A or G
  MOD_RES (25), (26), (27), (28): Xaa is A or G or is absent

SEQ ID NO: 83731 - protein, 37 aa, Artificial Sequence; identical to SEQ ID NO: 53366
  GFR-binding peptide
  MOD_RES (1), (2), (35), (37): Xaa is C or S
  MOD_RES (16), (17), (18), (19), (20): Xaa is A or G
  MOD_RES (21), (22), (23), (24): Xaa is A or G or is absent

SEQ ID NO: 83732 - protein, 33 aa, Artificial Sequence; identical to SEQ ID NO: 52177
  GFR-binding peptide
  MOD_RES (1), (2), (33): Xaa is C or S

SEQ ID NO: 83733 - protein, 41 aa, Artificial Sequence; identical to SEQ ID NO: 19903
  GFR-binding peptide
  MOD_RES (5), (39), (41): Xaa is C or S
  MOD_RES (19), (20), (21), (22), (23): Xaa is A or G
  MOD_RES (24), (25), (26), (27): Xaa is A or G or is absent

SEQ ID NO: 83734 - protein, 41 aa, Artificial Sequence; identical to SEQ ID NO: 19904
  GFR-binding peptide
  MOD_RES (4), (38), (40): Xaa is C or S

SEQ ID NO: 83735 - protein, 36 aa, Artificial Sequence; identical to SEQ ID NO: 19184
  GFR-binding peptide
  MOD_RES (36), (36): Xaa is C or S

SEQ ID NO: 83736 - protein, 32 aa, Artificial Sequence; identical to SEQ ID NO: 52179
  GFR-binding peptide
  MOD_RES (31), (31): Xaa is C or S

SEQ ID NO: 83737 - protein, 40 aa, Artificial Sequence; identical to SEQ ID NO: 19185
  GFR-binding peptide
  MOD_RES (5), (39): Xaa is C or S
  MOD_RES (19), (20), (21), (22), (23): Xaa is A or G
  MOD_RES (24), (25), (26), (27): Xaa is A or G or is absent

SEQ ID NO: 83738 - protein, 39 aa, Artificial Sequence; identical to SEQ ID NO: 19186
  GFR-binding peptide
  MOD_RES (36), (38): Xaa is C or S

SEQ ID NO: 83739 - protein, 38 aa, Artificial Sequence; identical to SEQ ID NO: 19905
  GFR-binding peptide
  MOD_RES (2), (36), (38): Xaa is C or S
  MOD_RES (16), (17), (18), (19), (20): Xaa is A or G
  MOD_RES (21), (22), (23), (24): Xaa is A or G or is absent

SEQ ID NO: 83740 - protein, 37 aa, Artificial Sequence; identical to SEQ ID NO: 19907
  GFR-binding peptide
  MOD_RES (36), (36): Xaa is C or S
  MOD_RES (15), (16), (17), (18), (19): Xaa is A or G
  MOD_RES (20), (21), (22), (23): Xaa is A or G or is absent

SEQ ID NO: 83741 - protein, 34 aa, Artificial Sequence; identical to SEQ ID NO: 55760
  GFR-binding peptide
  MOD_RES (1), (2): Xaa is C or S
  MOD_RES (16), (17), (18), (19), (20): Xaa is A or G
  MOD_RES (21), (22), (23), (24): Xaa is A or G or is absent

SEQ ID NO: 83742 - protein, 36 aa, Artificial Sequence; identical to SEQ ID NO: 19909
  GFR-binding peptide
  MOD_RES (3), (3): Xaa is C or S

SEQ ID NO: 83743 - protein, 39 aa, Artificial Sequence; identical to SEQ ID NO: 19910
  GFR-binding peptide
  MOD_RES (4), (38): Xaa is C or S

SEQ ID NO: 83744 - protein, 42 aa, Artificial Sequence; identical to SEQ ID NO: 19188
  GFR-binding peptide
  MOD_RES (5), (39), (41): Xaa is C or S

SEQ ID NO: 83745 - protein, 39 aa, Artificial Sequence; identical to SEQ ID NO: 19189
  GFR-binding peptide
  MOD_RES (2), (39): Xaa is C or S

SEQ ID NO: 83746 - protein, 35 aa, Artificial Sequence; identical to SEQ ID NO: 19912
  GFR-binding peptide
  MOD_RES (3), (3): Xaa is C or S
  MOD_RES (17), (18), (19), (20), (21): Xaa is A or G
  MOD_RES (22), (23), (24), (25): Xaa is A or G or is absent

SEQ ID NO: 83747 - protein, 37 aa, Artificial Sequence; identical to SEQ ID NO: 19913
  GFR-binding peptide
  MOD_RES (3), (3): Xaa is C or S

SEQ ID NO: 83748 - protein, 33 aa, Artificial Sequence; identical to SEQ ID NO: 54598
  GFR-binding peptide
  MOD_RES (33), (33): Xaa is C or S
  MOD_RES (14), (15), (16), (17), (18): Xaa is A or G
  MOD_RES (19), (20), (21), (22): Xaa is A or G or is absent

SEQ ID NO: 83749 - protein, 37 aa, Artificial Sequence; identical to SEQ ID NO: 52184
  GFR-binding peptide
  MOD_RES (3), (4), (35), (37): Xaa is C or S

SEQ ID NO: 83750 - protein, 40 aa, Artificial Sequence; identical to SEQ ID NO: 19916
  GFR-binding peptide
  MOD_RES (3), (37), (39): Xaa is C or S

SEQ ID NO: 83751 - protein, 43 aa, Artificial Sequence; identical to SEQ ID NO: 19194
  GFR-binding peptide
  MOD_RES (7), (41), (43): Xaa is C or S

SEQ ID NO: 83752 - protein, 33 aa, Artificial Sequence; identical to SEQ ID NO: 55777
  GFR-binding peptide
  MOD_RES (2), (3): Xaa is C or S

SEQ ID NO: 83753 - protein, 40 aa, Artificial Sequence; identical to SEQ ID NO: 19918
  GFR-binding peptide
  MOD_RES (1), (38), (40): Xaa is C or S
  MOD_RES (17), (18), (19), (20), (21): Xaa is A or G
  MOD_RES (22), (23), (24), (25): Xaa is A or G or is absent

SEQ ID NO: 83754 - protein, 40 aa, Artificial Sequence; identical to SEQ ID NO: 19919
  GFR-binding peptide
  MOD_RES (4), (4): Xaa is C or S
  MOD_RES (20), (21), (22), (23), (24): Xaa is A or G
  MOD_RES (25), (26), (27), (28): Xaa is A or G or is absent

SEQ ID NO: 83755 - protein, 38 aa, Artificial Sequence; identical to SEQ ID NO: 19920
  GFR-binding peptide
  MOD_RES (3), (37): Xaa is C or S
  MOD_RES (17), (18), (19), (20), (21): Xaa is A or G
  MOD_RES (22), (23), (24), (25): Xaa is A or G or is absent

SEQ ID NO: 83756 - protein, 38 aa, Artificial Sequence; identical to SEQ ID NO: 19921
  GFR-binding peptide
  MOD_RES (1), (38): Xaa is C or S
  MOD_RES (17), (18), (19), (20), (21): Xaa is A or G
  MOD_RES (22), (23), (24), (25): Xaa is A or G or is absent

SEQ ID NO: 83757 - protein, 36 aa, Artificial Sequence; identical to SEQ ID NO: 19922
  GFR-binding peptide
  MOD_RES (2), (36): Xaa is C or S

SEQ ID NO: 83758 - protein, 33 aa, Artificial Sequence; identical to SEQ ID NO: 55786
  GFR-binding peptide
  MOD_RES (1), (32): Xaa is C or S

SEQ ID NO: 83759 - protein, 35 aa, Artificial Sequence; identical to SEQ ID NO: 19923
  GFR-binding peptide
  MOD_RES (15), (16), (17), (18), (19): Xaa is A or G
  MOD_RES (20), (21), (22), (23): Xaa is A or G or is absent

SEQ ID NO: 83760 - protein, 37 aa, Artificial Sequence; identical to SEQ ID NO: 19924
  GFR-binding peptide
  MOD_RES (1), (1): Xaa is C or S
  MOD_RES (17), (18), (19), (20), (21): Xaa is A or G
  MOD_RES (22), (23), (24), (25): Xaa is A or G or is absent

SEQ ID NO: 83761 - protein, 40 aa, Artificial Sequence; identical to SEQ ID NO: 19925
  GFR-binding peptide
  MOD_RES (1), (38), (40): Xaa is C or S

SEQ ID NO: 83762 - protein, 37 aa, Artificial Sequence; identical to SEQ ID NO: 54611
  GFR-binding peptide
  MOD_RES (1), (34), (36): Xaa is C or S
  MOD_RES (15), (16), (17), (18), (19): Xaa is A or G
  MOD_RES (20), (21), (22), (23): Xaa is A or G or is absent

SEQ ID NO: 83763 - protein, 33 aa, Artificial Sequence; identical to SEQ ID NO: 53397
  GFR-binding peptide
  MOD_RES (1), (32): Xaa is C or S

SEQ ID NO: 83764 - protein, 40 aa, Artificial Sequence; identical to SEQ ID NO: 52197
  GFR-binding peptide
  MOD_RES (3), (4), (37), (39): Xaa is C or S
  MOD_RES (18), (19), (20), (21), (22): Xaa is A or G
  MOD_RES (23), (24), (25), (26): Xaa is A or G or is absent

SEQ ID NO: 83765 - protein, 37 aa, Artificial Sequence; identical to SEQ ID NO: 53399
  GFR-binding peptide
  MOD_RES (2), (3), (36): Xaa is C or S
  MOD_RES (17), (18), (19), (20), (21): Xaa is A or G
  MOD_RES (22), (23), (24), (25): Xaa is A or G or is absent

SEQ ID NO: 83766 - protein, 37 aa, Artificial Sequence; identical to SEQ ID NO: 19201
  GFR-binding peptide
  MOD_RES (2), (36): Xaa is C or S

SEQ ID NO: 83767 - protein, 37 aa, Artificial Sequence; identical to SEQ ID NO: 19202
  GFR-binding peptide
  MOD_RES (2), (2): Xaa is C or S
  MOD_RES (18), (19), (20), (21), (22): Xaa is A or G
  MOD_RES (23), (24), (25), (26): Xaa is A or G or is absent

SEQ ID NO: 83768 - protein, 36 aa, Artificial Sequence; identical to SEQ ID NO: 19203
  GFR-binding peptide
  MOD_RES (4), (4): Xaa is C or S
  MOD_RES (18), (19), (20), (21), (22): Xaa is A or G
  MOD_RES (23), (24), (25), (26): Xaa is A or G or is absent

SEQ ID NO: 83769 - protein, 39 aa, Artificial Sequence; identical to SEQ ID NO: 52203
  GFR-binding peptide
  MOD_RES (5), (6), (39): Xaa is C or S
  MOD_RES (20), (21), (22), (23), (24): Xaa is A or G
  MOD_RES (25), (26), (27), (28): Xaa is A or G or is absent

SEQ ID NO: 83770 - protein, 37 aa, Artificial Sequence; identical to SEQ ID NO: 19927
  GFR-binding peptide
  MOD_RES (4), (4): Xaa is C or S

SEQ ID NO: 83771 - protein, 39 aa, Artificial Sequence; identical to SEQ ID NO: 55796
  GFR-binding peptide
  MOD_RES (2), (3), (36), (38): Xaa is C or S
  MOD_RES (17), (18), (19), (20), (21): Xaa is A or G
  MOD_RES (22), (23), (24), (25): Xaa is A or G or is absent

SEQ ID NO: 83772 - protein, 40 aa, Artificial Sequence; identical to SEQ ID NO: 19928
  GFR-binding peptide
  MOD_RES (7), (7): Xaa is C or S

SEQ ID NO: 83773 - protein, 40 aa, Artificial Sequence; identical to SEQ ID NO: 19204
  GFR-binding peptide
  MOD_RES (5), (5): Xaa is C or S
  MOD_RES (21), (22), (23), (24), (25): Xaa is A or G
  MOD_RES (26), (27), (28), (29): Xaa is A or G or is absent

SEQ ID NO: 83774 - protein, 37 aa, Artificial Sequence; identical to SEQ ID NO: 19929
  GFR-binding peptide
  MOD_RES (1), (35), (37): Xaa is C or S

SEQ ID NO: 83775 - protein, 32 aa, Artificial Sequence; identical to SEQ ID NO: 52211
  GFR-binding peptide
  MOD_RES (1), (32): Xaa is C or S

SEQ ID NO: 83776 - protein, 34 aa, Artificial Sequence; identical to SEQ ID NO: 19931
  GFR-binding peptide
  MOD_RES (2), (2): Xaa is C or S

SEQ ID NO: 83777 - protein, 36 aa, Artificial Sequence; identical to SEQ ID NO: 55809
  GFR-binding peptide
  MOD_RES (5), (6): Xaa is C or S

SEQ ID NO: 83778 - protein, 40 aa, Artificial Sequence; identical to SEQ ID NO: 19205
  GFR-binding peptide
  MOD_RES (4), (4): Xaa is C or S
  MOD_RES (20), (21), (22), (23), (24): Xaa is A or G
  MOD_RES (25), (26), (27), (28): Xaa is A or G or is absent

SEQ ID NO: 83779 - protein, 31 aa, Artificial Sequence; identical to SEQ ID NO: 53411
  GFR-binding peptide
  MOD_RES (1), (1): Xaa is C or S

SEQ ID NO: 83780 - protein, 41 aa, Artificial Sequence; identical to SEQ ID NO: 19207
  GFR-binding peptide
  MOD_RES (2), (39), (41): Xaa is C or S

SEQ ID NO: 83781 - protein, 36 aa, Artificial Sequence; identical to SEQ ID NO: 53413
  GFR-binding peptide
  MOD_RES (1), (2), (35): Xaa is C or S
  MOD_RES (16), (17), (18), (19), (20): Xaa is A or G
  MOD_RES (21), (22), (23), (24): Xaa is A or G or is absent

SEQ ID NO: 83782 - protein, 32 aa, Artificial Sequence; identical to SEQ ID NO: 53415
  GFR-binding peptide
  MOD_RES (14), (15), (16), (17), (18): Xaa is A or G
  MOD_RES (19), (20), (21), (22): Xaa is A or G or is absent

SEQ ID NO: 83783 - protein, 38 aa, Artificial Sequence; identical to SEQ ID NO: 55811
  GFR-binding peptide
  MOD_RES (4), (5), (36), (38): Xaa is C or S

SEQ ID NO: 83784 - protein, 34 aa, Artificial Sequence; identical to SEQ ID NO: 19935
  GFR-binding peptide

SEQ ID NO: 83785 - protein, 38 aa, Artificial Sequence; identical to SEQ ID NO: 54622
  GFR-binding peptide
  MOD_RES (1), (2), (35), (37): Xaa is C or S
  MOD_RES (16), (17), (18), (19), (20): Xaa is A or G
  MOD_RES (21), (22), (23), (24): Xaa is A or G or is absent

SEQ ID NO: 83786 - protein, 41 aa, Artificial Sequence; identical to SEQ ID NO: 19936
  GFR-binding peptide
  MOD_RES (1), (38), (40): Xaa is C or S

SEQ ID NO: 83787 - protein, 38 aa, Artificial Sequence; identical to SEQ ID NO: 19211
  GFR-binding peptide
  MOD_RES (35), (37): Xaa is C or S

SEQ ID NO: 83788 - protein, 32 aa, Artificial Sequence; identical to SEQ ID NO: 54626
  GFR-binding peptide
  MOD_RES (31), (31): Xaa is C or S

SEQ ID NO: 83789 - protein, 38 aa, Artificial Sequence; identical to SEQ ID NO: 52219
  GFR-binding peptide
  MOD_RES (3), (4), (37): Xaa is C or S
  MOD_RES (18), (19), (20), (21), (22): Xaa is A or G
  MOD_RES (23), (24), (25), (26): Xaa is A or G or is absent

SEQ ID NO: 83790 - protein, 37 aa, Artificial Sequence; identical to SEQ ID NO: 19938
  GFR-binding peptide
  MOD_RES (1), (35), (37): Xaa is C or S
  MOD_RES (15), (16), (17), (18), (19): Xaa is A or G
  MOD_RES (20), (21), (22), (23): Xaa is A or G or is absent

SEQ ID NO: 83791 - protein, 38 aa, Artificial Sequence; identical to SEQ ID NO: 53422
  GFR-binding peptide
  MOD_RES (4), (5), (38): Xaa is C or S
  MOD_RES (19), (20), (21), (22), (23): Xaa is A or G
  MOD_RES (24), (25), (26), (27): Xaa is A or G or is absent

SEQ ID NO: 83792 - protein, 43 aa, Artificial Sequence; identical to SEQ ID NO: 19215
  GFR-binding peptide
  MOD_RES (5), (42): Xaa is C or S
  MOD_RES (21), (22), (23), (24), (25): Xaa is A or G
  MOD_RES (26), (27), (28), (29): Xaa is A or G or is absent

SEQ ID NO: 83793 - protein, 33 aa, Artificial Sequence; identical to SEQ ID NO: 55821
  GFR-binding peptide
  MOD_RES (1), (32): Xaa is C or S

SEQ ID NO: 83794 - protein, 37 aa, Artificial Sequence; identical to SEQ ID NO: 54634
  GFR-binding peptide
  MOD_RES (6), (7): Xaa is C or S

SEQ ID NO: 83795 - protein, 38 aa, Artificial Sequence; identical to SEQ ID NO: 19219
  GFR-binding peptide
  MOD_RES (37), (37): Xaa is C or S
  MOD_RES (16), (17), (18), (19), (20): Xaa is A or G
  MOD_RES (21), (22), (23), (24): Xaa is A or G or is absent

SEQ ID NO: 83796 - protein, 41 aa, Artificial Sequence; identical to SEQ ID NO: 19220
  GFR-binding peptide
  MOD_RES (7), (41): Xaa is C or S

SEQ ID NO: 83797 - protein, 38 aa, Artificial Sequence; identical to SEQ ID NO: 19945
  GFR-binding peptide
  MOD_RES (2), (2): Xaa is C or S

SEQ ID NO: 83798 - protein, 39 aa, Artificial Sequence; identical to SEQ ID NO: 52231
  GFR-binding peptide
  MOD_RES (5), (6), (37), (39): Xaa is C or S

SEQ ID NO: 83799 - protein, 41 aa, Artificial Sequence; identical to SEQ ID NO: 19221
  GFR-binding peptide
  MOD_RES (1), (38), (40): Xaa is C or S
  MOD_RES (17), (18), (19), (20), (21): Xaa is A or G
  MOD_RES (22), (23), (24), (25): Xaa is A or G or is absent

SEQ ID NO: 83800 - protein, 36 aa, Artificial Sequence; identical to SEQ ID NO: 54638
  GFR-binding peptide
  MOD_RES (5), (6): Xaa is C or S

SEQ ID NO: 83801 - protein, 37 aa, Artificial Sequence; identical to SEQ ID NO: 55826
  GFR-binding peptide
  MOD_RES (1), (34), (36): Xaa is C or S
  MOD_RES (15), (16), (17), (18), (19): Xaa is A or G
  MOD_RES (20), (21), (22), (23): Xaa is A or G or is absent

SEQ ID NO: 83802 - protein, 36 aa, Artificial Sequence; identical to SEQ ID NO: 19224
  GFR-binding peptide
  MOD_RES (3), (3): Xaa is C or S

SEQ ID NO: 83803 - protein, 33 aa, Artificial Sequence; identical to SEQ ID NO: 19225
  GFR-binding peptide
  MOD_RES (1), (1): Xaa is C or S

SEQ ID NO: 83804 - protein, 38 aa, Artificial Sequence; identical to SEQ ID NO: 53435
  GFR-binding peptide
  MOD_RES (3), (4), (37): Xaa is C or S
  MOD_RES (18), (19), (20), (21), (22): Xaa is A or G
  MOD_RES (23), (24), (25), (26): Xaa is A or G or is absent

SEQ ID NO: 83805 - protein, 34 aa, Artificial Sequence; identical to SEQ ID NO: 54642
  GFR-binding peptide
  MOD_RES (2), (3), (34): Xaa is C or S

SEQ ID NO: 83806 - protein, 38 aa, Artificial Sequence; identical to SEQ ID NO: 55831
  GFR-binding peptide
  MOD_RES (2), (3), (36), (38): Xaa is C or S
  MOD_RES (17), (18), (19), (20), (21): Xaa is A or G
  MOD_RES (22), (23), (24), (25): Xaa is A or G or is absent

SEQ ID NO: 83807 - protein, 34 aa, Artificial Sequence; identical to SEQ ID NO: 54643
  GFR-binding peptide
  MOD_RES (1), (32), (34): Xaa is C or S

SEQ ID NO: 83808 - protein, 45 aa, Artificial Sequence; identical to SEQ ID NO: 19229
  GFR-binding peptide
  MOD_RES (5), (42), (44): Xaa is C or S
  MOD_RES (21), (22), (23), (24), (25): Xaa is A or G
  MOD_RES (26), (27), (28), (29): Xaa is A or G or is absent

SEQ ID NO: 83809 - protein, 33 aa, Artificial Sequence; identical to SEQ ID NO: 19949
  GFR-binding peptide
  MOD_RES (14), (15), (16), (17), (18): Xaa is A or G
  MOD_RES (19), (20), (21), (22): Xaa is A or G or is absent

SEQ ID NO: 83810 - protein, 33 aa, Artificial Sequence; identical to SEQ ID NO: 19235
  GFR-binding peptide
  MOD_RES (1), (1): Xaa is C or S

SEQ ID NO: 83811 - protein, 41 aa, Artificial Sequence; identical to SEQ ID NO: 19237
  GFR-binding peptide
  MOD_RES (7), (41): Xaa is C or S
  MOD_RES (21), (22), (23), (24), (25): Xaa is A or G
  MOD_RES (26), (27), (28), (29): Xaa is A or G or is absent

SEQ ID NO: 83812 - protein, 37 aa, Artificial Sequence; identical to SEQ ID NO: 19951
  GFR-binding peptide
  MOD_RES (35), (37): Xaa is C or S
  MOD_RES (14), (15), (16), (17), (18): Xaa is A or G
  MOD_RES (19), (20), (21), (22): Xaa is A or G or is absent

SEQ ID NO: 83813 - protein, 43 aa, Artificial Sequence; identical to SEQ ID NO: 19239
  GFR-binding peptide
  MOD_RES (3), (40), (42): Xaa is C or S
  MOD_RES (19), (20), (21), (22), (23): Xaa is A or G
  MOD_RES (24), (25), (26), (27): Xaa is A or G or is absent

SEQ ID NO: 83814 - protein, 39 aa, Artificial Sequence; identical to SEQ ID NO: 52244
  GFR-binding peptide
  MOD_RES (6), (7): Xaa is C or S
  MOD_RES (21), (22), (23), (24), (25): Xaa is A or G
  MOD_RES (26), (27), (28), (29): Xaa is A or G or is absent

SEQ ID NO: 83815 - protein, 42 aa, Artificial Sequence; identical to SEQ ID NO: 19240
  GFR-binding peptide
  MOD_RES (5), (39), (41): Xaa is C or S
  MOD_RES (19), (20), (21), (22), (23): Xaa is A or G
  MOD_RES (24), (25), (26), (27): Xaa is A or G or is absent

SEQ ID NO: 83816 - protein, 42 aa, Artificial Sequence; identical to SEQ ID NO: 19953
  GFR-binding peptide
  MOD_RES (5), (42): Xaa is C or S
  MOD_RES (21), (22), (23), (24), (25): Xaa is A or G
  MOD_RES (26), (27), (28), (29): Xaa is A or G or is absent

SEQ ID NO: 83817 - protein, 38 aa, Artificial Sequence; identical to SEQ ID NO: 52248
  GFR-binding peptide
  MOD_RES (5), (6): Xaa is C or S
  MOD_RES (20), (21), (22), (23), (24): Xaa is A or G
  MOD_RES (25), (26), (27), (28): Xaa is A or G or is absent

SEQ ID NO: 83818 - protein, 38 aa, Artificial Sequence; identical to SEQ ID NO: 54655
  GFR-binding peptide
  MOD_RES (5), (6), (37): Xaa is C or S

SEQ ID NO: 83819 - protein, 35 aa, Artificial Sequence; identical to SEQ ID NO: 19243
  GFR-binding peptide
  MOD_RES (34), (34): Xaa is C or S

SEQ ID NO: 83820 - protein, 36 aa, Artificial Sequence; identical to SEQ ID NO: 19244
  GFR-binding peptide
  MOD_RES (35), (35): Xaa is C or S
  MOD_RES (14), (15), (16), (17), (18): Xaa is A or G
  MOD_RES (19), (20), (21), (22): Xaa is A or G or is absent

SEQ ID NO: 83821 - protein, 38 aa, Artificial Sequence; identical to SEQ ID NO: 52251
  GFR-binding peptide
  MOD_RES (3), (4), (35), (37): Xaa is C or S

SEQ ID NO: 83822 - protein, 38 aa, Artificial Sequence; identical to SEQ ID NO: 54660
  GFR-binding peptide
  MOD_RES (5), (6), (37): Xaa is C or S

SEQ ID NO: 83823 - protein, 42 aa, Artificial Sequence; identical to SEQ ID NO: 19246
  GFR-binding peptide
  MOD_RES (5), (39), (41): Xaa is C or S
  MOD_RES (19), (20), (21), (22), (23): Xaa is A or G
  MOD_RES (24), (25), (26), (27): Xaa is A or G or is absent

SEQ ID NO: 83824 - protein, 32 aa, Artificial Sequence; identical to SEQ ID NO: 19248
  GFR-binding peptide

SEQ ID NO: 83825 - protein, 38 aa, Artificial Sequence; identical to SEQ ID NO: 19249
  GFR-binding peptide
  MOD_RES (4), (38): Xaa is C or S
  MOD_RES (18), (19), (20), (21), (22): Xaa is A or G
  MOD_RES (23), (24), (25), (26): Xaa is A or G or is absent

SEQ ID NO: 83826 - protein, 43 aa, Artificial Sequence; identical to SEQ ID NO: 19959
  GFR-binding peptide
  MOD_RES (7), (41), (43): Xaa is C or S

SEQ ID NO: 83827 - protein, 40 aa, Artificial Sequence; identical to SEQ ID NO: 19961
  GFR-binding peptide
  MOD_RES (6), (40): Xaa is C or S
  MOD_RES (20), (21), (22), (23), (24): Xaa is A or G
  MOD_RES (25), (26), (27), (28): Xaa is A or G or is absent

SEQ ID NO: 83828 - protein, 41 aa, Artificial Sequence; identical to SEQ ID NO: 19251
  GFR-binding peptide
  MOD_RES (1), (38), (40): Xaa is C or S

SEQ ID NO: 83829 - protein, 42 aa, Artificial Sequence; identical to SEQ ID NO: 19252
  GFR-binding peptide
  MOD_RES (6), (40), (42): Xaa is C or S

SEQ ID NO: 83830 - protein, 38 aa, Artificial Sequence; identical to SEQ ID NO: 19962
  GFR-binding peptide
  MOD_RES (4), (4): Xaa is C or S
  MOD_RES (20), (21), (22), (23), (24): Xaa is A or G
  MOD_RES (25), (26), (27), (28): Xaa is A or G or is absent

SEQ ID NO: 83831 - protein, 37 aa, Artificial Sequence; identical to SEQ ID NO: 19963
  GFR-binding peptide
  MOD_RES (4), (4): Xaa is C or S
  MOD_RES (18), (19), (20), (21), (22): Xaa is A or G
  MOD_RES (23), (24), (25), (26): Xaa is A or G or is absent

SEQ ID NO: 83832 - protein, 36 aa, Artificial Sequence; identical to SEQ ID NO: 55853
  GFR-binding peptide
  MOD_RES (3), (4): Xaa is C or S
  MOD_RES (18), (19), (20), (21), (22): Xaa is A or G
  MOD_RES (23), (24), (25), (26): Xaa is A or G or is absent

SEQ ID NO: 83833 - protein, 43 aa, Artificial Sequence; identical to SEQ ID NO: 19964
  GFR-binding peptide
  MOD_RES (5), (42): Xaa is C or S
  MOD_RES (21), (22), (23), (24), (25): Xaa is A or G
  MOD_RES (26), (27), (28), (29): Xaa is A or G or is absent

SEQ ID NO: 83834 - protein, 37 aa, Artificial Sequence; identical to SEQ ID NO: 19965
  GFR-binding peptide
  MOD_RES (35), (37): Xaa is C or S
  MOD_RES (14), (15), (16), (17), (18): Xaa is A or G
  MOD_RES (19), (20), (21), (22): Xaa is A or G or is absent

SEQ ID NO: 83835 - protein, 32 aa, Artificial Sequence; identical to SEQ ID NO: 19253
  GFR-binding peptide
  MOD_RES (14), (15), (16), (17), (18): Xaa is A or G
  MOD_RES (19), (20), (21), (22): Xaa is A or G or is absent

SEQ ID NO: 83836 - protein, 33 aa, Artificial Sequence; identical to SEQ ID NO: 19254
  GFR-binding peptide

SEQ ID NO: 83837 - protein, 42 aa, Artificial Sequence; identical to SEQ ID NO: 19255
  GFR-binding peptide
  MOD_RES (2), (39), (41): Xaa is C or S

SEQ ID NO: 83838 - protein, 37 aa, Artificial Sequence; identical to SEQ ID NO: 19966
  GFR-binding peptide
  MOD_RES (35), (37): Xaa is C or S
  MOD_RES (14), (15), (16), (17), (18): Xaa is A or G
  MOD_RES (19), (20), (21), (22): Xaa is A or G or is absent

SEQ ID NO: 83839 - protein, 38 aa, Artificial Sequence; identical to SEQ ID NO: 52273
  GFR-binding peptide
  MOD_RES (5), (6): Xaa is C or S
  MOD_RES (20), (21), (22), (23), (24): Xaa is A or G
  MOD_RES (25), (26), (27), (28): Xaa is A or G or is absent

SEQ ID NO: 83840 - protein, 35 aa, Artificial Sequence; identical to SEQ ID NO: 52276
  GFR-binding peptide
  MOD_RES (4), (5): Xaa is C or S

SEQ ID NO: 83841 - protein, 39 aa, Artificial Sequence; identical to SEQ ID NO: 19258
  GFR-binding peptide
  MOD_RES (6), (6): Xaa is C or S

SEQ ID NO: 83842 - protein, 39 aa, Artificial Sequence; identical to SEQ ID NO: 19259
  GFR-binding peptide
  MOD_RES (3), (3): Xaa is C or S
  MOD_RES (19), (20), (21), (22), (23): Xaa is A or G
  MOD_RES (24), (25), (26), (27): Xaa is A or G or is absent

SEQ ID NO: 83843 - protein, 36 aa, Artificial Sequence; identical to SEQ ID NO: 54679
  GFR-binding peptide
  MOD_RES (5), (6): Xaa is C or S

SEQ ID NO: 83844 - protein, 36 aa, Artificial Sequence; identical to SEQ ID NO: 52283
  GFR-binding peptide
  MOD_RES (2), (3), (36): Xaa is C or S
  MOD_RES (17), (18), (19), (20), (21): Xaa is A or G
  MOD_RES (22), (23), (24), (25): Xaa is A or G or is absent

SEQ ID NO: 83845 - protein, 38 aa, Artificial Sequence; identical to SEQ ID NO: 52285
  GFR-binding peptide
  MOD_RES (6), (7), (38): Xaa is C or S

SEQ ID NO: 83846 - protein, 37 aa, Artificial Sequence; identical to SEQ ID NO: 54681
  GFR-binding peptide
  MOD_RES (5), (6), (37): Xaa is C or S

SEQ ID NO: 83847 - protein, 40 aa, Artificial Sequence; identical to SEQ ID NO: 19263
  GFR-binding peptide
  MOD_RES (2), (39): Xaa is C or S
  MOD_RES (18), (19), (20), (21), (22): Xaa is A or G
  MOD_RES (23), (24), (25), (26): Xaa is A or G or is absent

SEQ ID NO: 83848 - protein, 37 aa, Artificial Sequence; identical to SEQ ID NO: 19264
  GFR-binding peptide
  MOD_RES (34), (36): Xaa is C or S
  MOD_RES (14), (15), (16), (17), (18): Xaa is A or G
  MOD_RES (19), (20), (21), (22): Xaa is A or G or is absent

SEQ ID NO: 83849 - protein, 34 aa, Artificial Sequence; identical to SEQ ID NO: 52292
  GFR-binding peptide
  MOD_RES (31), (33): Xaa is C or S

SEQ ID NO: 83850 - protein, 34 aa, Artificial Sequence; identical to SEQ ID NO: 19271
  GFR-binding peptide
  MOD_RES (1), (1): Xaa is C or S

SEQ ID NO: 83851 - protein, 34 aa, Artificial Sequence; identical to SEQ ID NO: 52298
  GFR-binding peptide
  MOD_RES (1), (34): Xaa is C or S
  MOD_RES (15), (16), (17), (18), (19): Xaa is A or G
  MOD_RES (20), (21), (22), (23): Xaa is A or G or is absent

SEQ ID NO: 83852 - protein, 35 aa, Artificial Sequence; identical to SEQ ID NO: 19973
  GFR-binding peptide
  MOD_RES (15), (16), (17), (18), (19): Xaa is A or G
  MOD_RES (20), (21), (22), (23): Xaa is A or G or is absent

SEQ ID NO: 83853 - protein, 34 aa, Artificial Sequence; identical to SEQ ID NO: 19976
  GFR-binding peptide
  MOD_RES (15), (16), (17), (18), (19): Xaa is A or G
  MOD_RES (20), (21), (22), (23): Xaa is A or G or is absent

SEQ ID NO: 83854 - protein, 36 aa, Artificial Sequence; identical to SEQ ID NO: 52308
  GFR-binding peptide
  MOD_RES (1), (34), (36): Xaa is C or S
  MOD_RES (15), (16), (17), (18), (19): Xaa is A or G
  MOD_RES (20), (21), (22), (23): Xaa is A or G or is absent

SEQ ID NO: 83855 - protein, 35 aa, Artificial Sequence; identical to SEQ ID NO: 19977
  GFR-binding peptide
  MOD_RES (16), (17), (18), (19), (20): Xaa is A or G
  MOD_RES (21), (22), (23), (24): Xaa is A or G or is absent

SEQ ID NO: 83856 - protein, 39 aa, Artificial Sequence; identical to SEQ ID NO: 19979
  GFR-binding peptide
  MOD_RES (36), (38): Xaa is C or S
  MOD_RES (15), (16), (17), (18), (19): Xaa is A or G
  MOD_RES (20), (21), (22), (23): Xaa is A or G or is absent

SEQ ID NO: 83857 - protein, 40 aa, Artificial Sequence; identical to SEQ ID NO: 52309
  GFR-binding peptide
  MOD_RES (6), (7), (38), (40): Xaa is C or S

SEQ ID NO: 83858 - protein, 40 aa, Artificial Sequence; identical to SEQ ID NO: 53495
  GFR-binding peptide
  MOD_RES (5), (6), (39): Xaa is C or S
  MOD_RES (20), (21), (22), (23), (24): Xaa is A or G
  MOD_RES (25), (26), (27), (28): Xaa is A or G or is absent

SEQ ID NO: 83859 - protein, 34 aa, Artificial Sequence; identical to SEQ ID NO: 19273
  GFR-binding peptide
  MOD_RES (15), (16), (17), (18), (19): Xaa is A or G
  MOD_RES (20), (21), (22), (23): Xaa is A or G or is absent

SEQ ID NO: 83860 - protein, 34 aa, Artificial Sequence; identical to SEQ ID NO: 19982
  GFR-binding peptide
  MOD_RES (2), (2): Xaa is C or S
  MOD_RES (16), (17), (18), (19), (20): Xaa is A or G
  MOD_RES (21), (22), (23), (24): Xaa is A or G or is absent

SEQ ID NO: 83861 - protein, 42 aa, Artificial Sequence; identical to SEQ ID NO: 19983
  GFR-binding peptide
  MOD_RES (6), (40), (42): Xaa is C or S
  MOD_RES (20), (21), (22), (23), (24): Xaa is A or G
  MOD_RES (25), (26), (27), (28): Xaa is A or G or is absent

SEQ ID NO: 83862 - protein, 41 aa, Artificial Sequence; identical to SEQ ID NO: 55893
  GFR-binding peptide
  MOD_RES (6), (7), (40): Xaa is C or S
  MOD_RES (21), (22), (23), (24), (25): Xaa is A or G
  MOD_RES (26), (27), (28), (29): Xaa is A or G or is absent

SEQ ID NO: 83863 - protein, 38 aa, Artificial Sequence; identical to SEQ ID NO: 19986
  GFR-binding peptide
  MOD_RES (36), (38): Xaa is C or S
  MOD_RES (15), (16), (17), (18), (19): Xaa is A or G
  MOD_RES (20), (21), (22), (23): Xaa is A or G or is absent

SEQ ID NO: 83864 - protein, 33 aa, Artificial Sequence; identical to SEQ ID NO: 19276
  GFR-binding peptide
  MOD_RES (1), (1): Xaa is C or S

SEQ ID NO: 83865 - protein, 37 aa, Artificial Sequence; identical to SEQ ID NO: 54711
  GFR-binding peptide
  MOD_RES (4), (5), (36): Xaa is C or S

SEQ ID NO: 83866 - protein, 35 aa, Artificial Sequence; identical to SEQ ID NO: 19988
  GFR-binding peptide
  MOD_RES (35), (35): Xaa is C or S

SEQ ID NO: 83867 - protein, 38 aa, Artificial Sequence; identical to SEQ ID NO: 19989
  GFR-binding peptide
  MOD_RES (5), (5): Xaa is C or S

SEQ ID NO: 83868 - protein, 36 aa, Artificial Sequence; identical to SEQ ID NO: 54714
  GFR-binding peptide
  MOD_RES (33), (35): Xaa is C or S
  MOD_RES (14), (15), (16), (17), (18): Xaa is A or G
  MOD_RES (19), (20), (21), (22): Xaa is A or G or is absent

SEQ ID NO: 83869 - protein, 41 aa, Artificial Sequence; identical to SEQ ID NO: 19278
  GFR-binding peptide
  MOD_RES (4), (38), (40): Xaa is C or S

SEQ ID NO: 83870 - protein, 42 aa, Artificial Sequence; identical to SEQ ID NO: 53520
  GFR-binding peptide
  MOD_RES (6), (7), (40), (42): Xaa is C or S
  MOD_RES (21), (22), (23), (24), (25): Xaa is A or G
  MOD_RES (26), (27), (28), (29): Xaa is A or G or is absent

SEQ ID NO: 83871 - protein, 41 aa, Artificial Sequence; identical to SEQ ID NO: 19281
  GFR-binding peptide
  MOD_RES (7), (41): Xaa is C or S

SEQ ID NO: 83872 - protein, 37 aa, Artificial Sequence; identical to SEQ ID NO: 19994
  GFR-binding peptide
  MOD_RES (3), (37): Xaa is C or S

SEQ ID NO: 83873 - protein, 33 aa, Artificial Sequence; identical to SEQ ID NO: 53522
  GFR-binding peptide
  MOD_RES (1), (2), (33): Xaa is C or S

SEQ ID NO: 83874 - protein, 41 aa, Artificial Sequence; identical to SEQ ID NO: 19282
  GFR-binding peptide
  MOD_RES (7), (41): Xaa is C or S
  MOD_RES (21), (22), (23), (24), (25): Xaa is A or G
  MOD_RES (26), (27), (28), (29): Xaa is A or G or is absent

SEQ ID NO: 83875 - protein, 37 aa, Artificial Sequence; identical to SEQ ID NO: 19996
  GFR-binding peptide
  MOD_RES (3), (37): Xaa is C or S
  MOD_RES (17), (18), (19), (20), (21): Xaa is A or G
  MOD_RES (22), (23), (24), (25): Xaa is A or G or is absent

SEQ ID NO: 83876 - protein, 35 aa, Artificial Sequence; identical to SEQ ID NO: 53524
  GFR-binding peptide
  MOD_RES (3), (4), (35): Xaa is C or S

SEQ ID NO: 83877 - protein, 40 aa, Artificial Sequence; identical to SEQ ID NO: 19285
  GFR-binding peptide
  MOD_RES (37), (39): Xaa is C or S
  MOD_RES (16), (17), (18), (19), (20): Xaa is A or G
  MOD_RES (21), (22), (23), (24): Xaa is A or G or is absent

SEQ ID NO: 83878 - protein, 34 aa, Artificial Sequence; identical to SEQ ID NO: 19286
  GFR-binding peptide
  MOD_RES (34), (34): Xaa is C or S
  MOD_RES (14), (15), (16), (17), (18): Xaa is A or G
  MOD_RES (19), (20), (21), (22): Xaa is A or G or is absent

SEQ ID NO: 83879 - protein, 38 aa, Artificial Sequence; identical to SEQ ID NO: 19997
  GFR-binding peptide
  MOD_RES (2), (2): Xaa is C or S

SEQ ID NO: 83880 - protein, 40 aa, Artificial Sequence; identical to SEQ ID NO: 54725
  GFR-binding peptide
  MOD_RES (5), (6), (39): Xaa is C or S
  MOD_RES (20), (21), (22), (23), (24): Xaa is A or G
  MOD_RES (25), (26), (27), (28): Xaa is A or G or is absent

SEQ ID NO: 83881 - protein, 37 aa, Artificial Sequence; identical to SEQ ID NO: 19287
  GFR-binding peptide
  MOD_RES (2), (2): Xaa is C or S
  MOD_RES (18), (19), (20), (21), (22): Xaa is A or G
  MOD_RES (23), (24), (25), (26): Xaa is A or G or is absent

SEQ ID NO: 83882 - protein, 32 aa, Artificial Sequence; identical to SEQ ID NO: 53528
  GFR-binding peptide
  MOD_RES (31), (31): Xaa is C or S

SEQ ID NO: 83883 - protein, 38 aa, Artificial Sequence; identical to SEQ ID NO: 53530
  GFR-binding peptide
  MOD_RES (3), (4), (35), (37): Xaa is C or S

SEQ ID NO: 83884 - protein, 33 aa, Artificial Sequence; identical to SEQ ID NO: 53532
  GFR-binding peptide
  MOD_RES (2), (3): Xaa is C or S

SEQ ID NO: 83885 - protein, 38 aa, Artificial Sequence; identical to SEQ ID NO: 52351
  GFR-binding peptide
  MOD_RES (5), (6), (37): Xaa is C or S

SEQ ID NO: 83886 - protein, 40 aa, Artificial Sequence; identical to SEQ ID NO: 19288
  GFR-binding peptide
  MOD_RES (4), (38), (40): Xaa is C or S

SEQ ID NO: 83887 - protein, 36 aa, Artificial Sequence; identical to SEQ ID NO: 19999
  GFR-binding peptide
  MOD_RES (34), (36): Xaa is C or S
  MOD_RES (14), (15), (16), (17), (18): Xaa is A or G
  MOD_RES (19), (20), (21), (22): Xaa is A or G or is absent

SEQ ID NO: 83888 - protein, 35 aa, Artificial Sequence; identical to SEQ ID NO: 52354
  GFR-binding peptide
  MOD_RES (2), (3): Xaa is C or S
  MOD_RES (17), (18), (19), (20), (21): Xaa is A or G
  MOD_RES (22), (23), (24), (25): Xaa is A or G or is absent

SEQ ID NO: 83889 - protein, 36 aa, Artificial Sequence; identical to SEQ ID NO: 20000
  GFR-binding peptide
  MOD_RES (1), (1): Xaa is C or S
  MOD_RES (17), (18), (19), (20), (21): Xaa is A or G
  MOD_RES (22), (23), (24), (25): Xaa is A or G or is absent

SEQ ID NO: 83890 - protein, 40 aa, Artificial Sequence; identical to SEQ ID NO: 20001
  GFR-binding peptide
  MOD_RES (6), (40): Xaa is C or S

SEQ ID NO: 83891 - protein, 42 aa, Artificial Sequence; identical to SEQ ID NO: 19290
  GFR-binding peptide
  MOD_RES (4), (41): Xaa is C or S
  MOD_RES (20), (21), (22), (23), (24): Xaa is A or G
  MOD_RES (25), (26), (27), (28): Xaa is A or G or is absent

SEQ ID NO: 83892 - protein, 37 aa, Artificial Sequence; identical to SEQ ID NO: 20003
  GFR-binding peptide
  MOD_RES (1), (35), (37): Xaa is C or S
  MOD_RES (15), (16), (17), (18), (19): Xaa is A or G
  MOD_RES (20), (21), (22), (23): Xaa is A or G or is absent

SEQ ID NO: 83893 - protein, 40 aa, Artificial Sequence; identical to SEQ ID NO: 20004
  GFR-binding peptide
  MOD_RES (6), (40): Xaa is C or S

SEQ ID NO: 83894 - protein, 36 aa, Artificial Sequence; identical to SEQ ID NO: 20005
  GFR-binding peptide
  MOD_RES (2), (2): Xaa is C or S
  MOD_RES (18), (19), (20), (21), (22): Xaa is A or G
  MOD_RES (23), (24), (25), (26): Xaa is A or G or is absent

SEQ ID NO: 83895 - protein, 40 aa, Artificial Sequence; identical to SEQ ID NO: 20007
  GFR-binding peptide
  MOD_RES (3), (40): Xaa is C or S
  MOD_RES (19), (20), (21), (22), (23): Xaa is A or G
  MOD_RES (24), (25), (26), (27): Xaa is A or G or is absent

SEQ ID NO: 83896 - protein, 34 aa, Artificial Sequence; identical to SEQ ID NO: 20009
  GFR-binding peptide
  MOD_RES (16), (17), (18), (19), (20): Xaa is A or G
  MOD_RES (21), (22), (23), (24): Xaa is A or G or is absent

SEQ ID NO: 83897 - protein, 39 aa, Artificial Sequence; identical to SEQ ID NO: 55928
  GFR-binding peptide
  MOD_RES (6), (7), (38): Xaa is C or S

SEQ ID NO: 83898 - protein, 32 aa, Artificial Sequence; identical to SEQ ID NO: 19292
  GFR-binding peptide
  MOD_RES (14), (15), (16), (17), (18): Xaa is A or G
  MOD_RES (19), (20), (21), (22): Xaa is A or G or is absent

SEQ ID NO: 83899 - protein, 35 aa, Artificial Sequence; identical to SEQ ID NO: 54739
  GFR-binding peptide
  MOD_RES (4), (5): Xaa is C or S

SEQ ID NO: 83900 - protein, 32 aa, Artificial Sequence; identical to SEQ ID NO: 19293
  GFR-binding peptide
  MOD_RES (14), (15), (16), (17), (18): Xaa is A or G
  MOD_RES (19), (20), (21), (22): Xaa is A or G or is absent

SEQ ID NO: 83901 - protein, 40 aa, Artificial Sequence; identical to SEQ ID NO: 53550
  GFR-binding peptide
  MOD_RES (4), (5), (38), (40): Xaa is C or S
  MOD_RES (19), (20), (21), (22), (23): Xaa is A or G
  MOD_RES (24), (25), (26), (27): Xaa is A or G or is absent

SEQ ID NO: 83902 - protein, 38 aa, Artificial Sequence; identical to SEQ ID NO: 54743
  GFR-binding peptide
  MOD_RES (5), (6): Xaa is C or S
  MOD_RES (20), (21), (22), (23), (24): Xaa is A or G
  MOD_RES (25), (26), (27), (28): Xaa is A or G or is absent

SEQ ID NO: 83903 - protein, 40 aa, Artificial Sequence; identical to SEQ ID NO: 20011
  GFR-binding peptide
  MOD_RES (37), (39): Xaa is C or S

SEQ ID NO: 83904 - protein, 41 aa, Artificial Sequence; identical to SEQ ID NO: 54746
  GFR-binding peptide
  MOD_RES (6), (7), (38), (40): Xaa is C or S

SEQ ID NO: 83905 - protein, 41 aa, Artificial Sequence; identical to SEQ ID NO: 19296
  GFR-binding peptide
  MOD_RES (5), (39), (41): Xaa is C or S

SEQ ID NO: 83906 - protein, 36 aa, Artificial Sequence; identical to SEQ ID NO: 20012
  GFR-binding peptide
  MOD_RES (35), (35): Xaa is C or S

SEQ ID NO: 83907 - protein, 33 aa, Artificial Sequence; identical to SEQ ID NO: 20015
  GFR-binding peptide

SEQ ID NO: 83908 - protein, 38 aa, Artificial Sequence; identical to SEQ ID NO: 55937
  GFR-binding peptide
  MOD_RES (4), (5), (38): Xaa is C or S
  MOD_RES (19), (20), (21), (22), (23): Xaa is A or G
  MOD_RES (24), (25), (26), (27): Xaa is A or G or is absent

SEQ ID NO: 83909 - protein, 36 aa, Artificial Sequence; identical to SEQ ID NO: 19297
  GFR-binding peptide
  MOD_RES (3), (3): Xaa is C or S
  MOD_RES (17), (18), (19), (20), (21): Xaa is A or G
  MOD_RES (22), (23), (24), (25): Xaa is A or G or is absent

SEQ ID NO: 83910 - protein, 35 aa, Artificial Sequence; identical to SEQ ID NO: 52373
  GFR-binding peptide
  MOD_RES (1), (32), (34): Xaa is C or S

SEQ ID NO: 83911 - protein, 36 aa, Artificial Sequence; identical to SEQ ID NO: 55938
  GFR-binding peptide
  MOD_RES (1), (2), (33), (35): Xaa is C or S

SEQ ID NO: 83912 - protein, 34 aa, Artificial Sequence; identical to SEQ ID NO: 19300
  GFR-binding peptide
  MOD_RES (16), (17), (18), (19), (20): Xaa is A or G
  MOD_RES (21), (22), (23), (24): Xaa is A or G or is absent

SEQ ID NO: 83913 - protein, 36 aa, Artificial Sequence; identical to SEQ ID NO: 20019
  GFR-binding peptide
  MOD_RES (36), (36): Xaa is C or S
  MOD_RES (15), (16), (17), (18), (19): Xaa is A or G
  MOD_RES (20), (21), (22), (23): Xaa is A or G or is absent

SEQ ID NO: 83914 - protein, 39 aa, Artificial Sequence; identical to SEQ ID NO: 20020
  GFR-binding peptide
  MOD_RES (4), (38): Xaa is C or S
  MOD_RES (18), (19), (20), (21), (22): Xaa is A or G
  MOD_RES (23), (24), (25), (26): Xaa is A or G or is absent

SEQ ID NO: 83915 - protein, 41 aa, Artificial Sequence; identical to SEQ ID NO: 19302
  GFR-binding peptide
  MOD_RES (4), (41): Xaa is C or S
  MOD_RES (20), (21), (22), (23), (24): Xaa is A or G
  MOD_RES (25), (26), (27), (28): Xaa is A or G or is absent

SEQ ID NO: 83916 - protein, 40 aa, Artificial Sequence; identical to SEQ ID NO: 55945
  GFR-binding peptide
  MOD_RES (5), (6), (39): Xaa is C or S
  MOD_RES (20), (21), (22), (23), (24): Xaa is A or G
  MOD_RES (25), (26), (27), (28): Xaa is A or G or is absent

SEQ ID NO: 83917 - protein, 39 aa, Artificial Sequence; identical to SEQ ID NO: 54757
  GFR-binding peptide
  MOD_RES (6), (7), (38): Xaa is C or S

SEQ ID NO: 83918 - protein, 35 aa, Artificial Sequence; identical to SEQ ID NO: 19304
  GFR-binding peptide
  MOD_RES (2), (2): Xaa is C or S
  MOD_RES (16), (17), (18), (19), (20): Xaa is A or G
  MOD_RES (21), (22), (23), (24): Xaa is A or G or is absent

SEQ ID NO: 83919 - protein, 33 aa, Artificial Sequence; identical to SEQ ID NO: 19305
  GFR-binding peptide
  MOD_RES (1), (1): Xaa is C or S
  MOD_RES (15), (16), (17), (18), (19): Xaa is A or G
  MOD_RES (20), (21), (22), (23): Xaa is A or G or is absent

SEQ ID NO: 83920 - protein, 36 aa, Artificial Sequence; identical to SEQ ID NO: 54758
  GFR-binding peptide
  MOD_RES (1), (2), (33), (35): Xaa is C or S

SEQ ID NO: 83921 - protein, 41 aa, Artificial Sequence; identical to SEQ ID NO: 20023
  GFR-binding peptide
  MOD_RES (5), (5): Xaa is C or S
  MOD_RES (21), (22), (23), (24), (25): Xaa is A or G
  MOD_RES (26), (27), (28), (29): Xaa is A or G or is absent

SEQ ID NO: 83922 - protein, 42 aa, Artificial Sequence; identical to SEQ ID NO: 20024
  GFR-binding peptide
  MOD_RES (2), (39), (41): Xaa is C or S
  MOD_RES (18), (19), (20), (21), (22): Xaa is A or G
  MOD_RES (23), (24), (25), (26): Xaa is A or G or is absent

SEQ ID NO: 83923 - protein, 37 aa, Artificial Sequence; identical to SEQ ID NO: 54761
  GFR-binding peptide
  MOD_RES (2), (3), (34), (36): Xaa is C or S

SEQ ID NO: 83924 - protein, 40 aa, Artificial Sequence; identical to SEQ ID NO: 54762
  GFR-binding peptide
  MOD_RES (4), (5), (38), (40): Xaa is C or S
  MOD_RES (19), (20), (21), (22), (23): Xaa is A or G
  MOD_RES (24), (25), (26), (27): Xaa is A or G or is absent

SEQ ID NO: 83925 - protein, 39 aa, Artificial Sequence; identical to SEQ ID NO: 20026
  GFR-binding peptide
  MOD_RES (2), (36), (38): Xaa is C or S

SEQ ID NO: 83926 - protein, 37 aa, Artificial Sequence; identical to SEQ ID NO: 19307
  GFR-binding peptide
  MOD_RES (34), (36): Xaa is C or S
  MOD_RES (14), (15), (16), (17), (18): Xaa is A or G
  MOD_RES (19), (20), (21), (22): Xaa is A or G or is absent

SEQ ID NO: 83927 - protein, 37 aa, Artificial Sequence; identical to SEQ ID NO: 55955
  GFR-binding peptide
  MOD_RES (4), (5), (36): Xaa is C or S

SEQ ID NO: 83928 - protein, 41 aa, Artificial Sequence; identical to SEQ ID NO: 19311
  GFR-binding peptide
  MOD_RES (5), (5): Xaa is C or S
  MOD_RES (21), (22), (23), (24), (25): Xaa is A or G
  MOD_RES (26), (27), (28), (29): Xaa is A or G or is absent

SEQ ID NO: 83929 - protein, 36 aa, Artificial Sequence; identical to SEQ ID NO: 19313
  GFR-binding peptide
  MOD_RES (1), (35): Xaa is C or S

SEQ ID NO: 83930 - protein, 35 aa, Artificial Sequence; identical to SEQ ID NO: 19314
  GFR-binding peptide

SEQ ID NO: 83931 - protein, 38 aa, Artificial Sequence; identical to SEQ ID NO: 19315
  GFR-binding peptide
  MOD_RES (2), (36), (38): Xaa is C or S
  MOD_RES (16), (17), (18), (19), (20): Xaa is A or G
  MOD_RES (21), (22), (23), (24): Xaa is A or G or is absent

SEQ ID NO: 83932 - protein, 42 aa, Artificial Sequence; identical to SEQ ID NO: 20030
  GFR-binding peptide
  MOD_RES (7), (41): Xaa is C or S
  MOD_RES (21), (22), (23), (24), (25): Xaa is A or G
  MOD_RES (26), (27), (28), (29): Xaa is A or G or is absent

SEQ ID NO: 83933 - protein, 35 aa, Artificial Sequence; identical to SEQ ID NO: 54770
  GFR-binding peptide
  MOD_RES (2), (3): Xaa is C or S
  MOD_RES (17), (18), (19), (20), (21): Xaa is A or G
  MOD_RES (22), (23), (24), (25): Xaa is A or G or is absent

SEQ ID NO: 83934 - protein, 39 aa, Artificial Sequence; identical to SEQ ID NO: 55965
  GFR-binding peptide
  MOD_RES (2), (3), (36), (38): Xaa is C or S
  MOD_RES (17), (18), (19), (20), (21): Xaa is A or G
  MOD_RES (22), (23), (24), (25): Xaa is A or G or is absent

SEQ ID NO: 83935 - protein, 41 aa, Artificial Sequence; identical to SEQ ID NO: 20031
  GFR-binding peptide
  MOD_RES (6), (40): Xaa is C or S
  MOD_RES (20), (21), (22), (23), (24): Xaa is A or G
  MOD_RES (25), (26), (27), (28): Xaa is A or G or is absent

SEQ ID NO: 83936 - protein, 38 aa, Artificial Sequence; identical to SEQ ID NO: 19318
  GFR-binding peptide
  MOD_RES (3), (37): Xaa is C or S
  MOD_RES (17), (18), (19), (20), (21): Xaa is A or G
  MOD_RES (22), (23), (24), (25): Xaa is A or G or is absent

SEQ ID NO: 83937 - protein, 36 aa, Artificial Sequence; identical to SEQ ID NO: 19319
  GFR-binding peptide
  MOD_RES (36), (36): Xaa is C or S
  MOD_RES (15), (16), (17), (18), (19): Xaa is A or G
  MOD_RES (20), (21), (22), (23): Xaa is A or G or is absent

SEQ ID NO: 83938 - protein, 37 aa, Artificial Sequence; identical to SEQ ID NO: 19320
  GFR-binding peptide
  MOD_RES (4), (4): Xaa is C or S
  MOD_RES (18), (19), (20), (21), (22): Xaa is A or G
  MOD_RES (23), (24), (25), (26): Xaa is A or G or is absent

SEQ ID NO: 83939 - protein, 41 aa, Artificial Sequence; identical to SEQ ID NO: 52411
  GFR-binding peptide
  MOD_RES (4), (5), (38), (40): Xaa is C or S
  MOD_RES (19), (20), (21), (22), (23): Xaa is A or G
  MOD_RES (24), (25), (26), (27): Xaa is A or G or is absent

SEQ ID NO: 83940 - protein, 34 aa, Artificial Sequence; identical to SEQ ID NO: 19321
  GFR-binding peptide

SEQ ID NO: 83941 - protein, 38 aa, Artificial Sequence; identical to SEQ ID NO: 19322
  GFR-binding peptide
  MOD_RES (4), (38): Xaa is C or S

SEQ ID NO: 83942 - protein, 33 aa, Artificial Sequence; identical to SEQ ID NO: 19323
  GFR-binding peptide
  MOD_RES (1), (1): Xaa is C or S
  MOD_RES (15), (16), (17), (18), (19): Xaa is A or G
  MOD_RES (20), (21), (22), (23): Xaa is A or G or is absent

SEQ ID NO: 83943 - protein, 43 aa, Artificial Sequence; identical to SEQ ID NO: 53587
  GFR-binding peptide
  MOD_RES (6), (7), (40), (42): Xaa is C or S
  MOD_RES (21), (22), (23), (24), (25): Xaa is A or G
  MOD_RES (26), (27), (28), (29): Xaa is A or G or is absent

SEQ ID NO: 83944 - protein, 36 aa, Artificial Sequence; identical to SEQ ID NO: 54783
  GFR-binding peptide
  MOD_RES (2), (3), (34), (36): Xaa is C or S

SEQ ID NO: 83945 - protein, 37 aa, Artificial Sequence; identical to SEQ ID NO: 53591
  GFR-binding peptide
  MOD_RES (6), (7): Xaa is C or S

SEQ ID NO: 83946 - protein, 39 aa, Artificial Sequence; identical to SEQ ID NO: 19324
  GFR-binding peptide
  MOD_RES (5), (5): Xaa is C or S
  MOD_RES (21), (22), (23), (24), (25): Xaa is A or G
  MOD_RES (26), (27), (28), (29): Xaa is A or G or is absent

SEQ ID NO: 83947 - protein, 37 aa, Artificial Sequence; identical to SEQ ID NO: 52424
  GFR-binding peptide
  MOD_RES (1), (2), (35), (37): Xaa is C or S
  MOD_RES (16), (17), (18), (19), (20): Xaa is A or G
  MOD_RES (21), (22), (23), (24): Xaa is A or G or is absent

SEQ ID NO: 83948 - protein, 42 aa, Artificial Sequence; identical to SEQ ID NO: 19325
  GFR-binding peptide
  MOD_RES (3), (40), (42): Xaa is C or S

SEQ ID NO: 83949 - protein, 39 aa, Artificial Sequence; identical to SEQ ID NO: 20041
  GFR-binding peptide
  MOD_RES (2), (36), (38): Xaa is C or S

SEQ ID NO: 83950 - protein, 42 aa, Artificial Sequence; identical to SEQ ID NO: 19328
  GFR-binding peptide
  MOD_RES (6), (40), (42): Xaa is C or S

SEQ ID NO: 83951 - protein, 37 aa, Artificial Sequence; identical to SEQ ID NO: 53595
  GFR-binding peptide
  MOD_RES (4), (5): Xaa is C or S
  MOD_RES (19), (20), (21), (22), (23): Xaa is A or G
  MOD_RES (24), (25), (26), (27): Xaa is A or G or is absent

SEQ ID NO: 83952 - protein, 39 aa, Artificial Sequence; identical to SEQ ID NO: 20044
  GFR-binding peptide
  MOD_RES (5), (5): Xaa is C or S
  MOD_RES (21), (22), (23), (24), (25): Xaa is A or G
  MOD_RES (26), (27), (28), (29): Xaa is A or G or is absent

SEQ ID NO: 83953 - protein, 35 aa, Artificial Sequence; identical to SEQ ID NO: 54790
  GFR-binding peptide
  MOD_RES (33), (35): Xaa is C or S
  MOD_RES (14), (15), (16), (17), (18): Xaa is A or G
  MOD_RES (19), (20), (21), (22): Xaa is A or G or is absent

SEQ ID NO: 83954 - protein, 41 aa, Artificial Sequence; identical to SEQ ID NO: 19329
  GFR-binding peptide
  MOD_RES (5), (5): Xaa is C or S

SEQ ID NO: 83955 - protein, 42 aa, Artificial Sequence; identical to SEQ ID NO: 53598
  GFR-binding peptide
  MOD_RES (6), (7), (40), (42): Xaa is C or S
  MOD_RES (21), (22), (23), (24), (25): Xaa is A or G
  MOD_RES (26), (27), (28), (29): Xaa is A or G or is absent

SEQ ID NO: 83956 - protein, 35 aa, Artificial Sequence; identical to SEQ ID NO: 52430
  GFR-binding peptide
  MOD_RES (1), (2), (35): Xaa is C or S
  MOD_RES (16), (17), (18), (19), (20): Xaa is A or G
  MOD_RES (21), (22), (23), (24): Xaa is A or G or is absent

SEQ ID NO: 83957 - protein, 35 aa, Artificial Sequence; identical to SEQ ID NO: 54794
  GFR-binding peptide
  MOD_RES (3), (4), (35): Xaa is C or S

SEQ ID NO: 83958 - protein, 36 aa, Artificial Sequence; identical to SEQ ID NO: 19331
  GFR-binding peptide
  MOD_RES (4), (4): Xaa is C or S

SEQ ID NO: 83959 - protein, 40 aa, Artificial Sequence; identical to SEQ ID NO: 20045
  GFR-binding peptide
  MOD_RES (4), (38), (40): Xaa is C or S

SEQ ID NO: 83960 - protein, 34 aa, Artificial Sequence; identical to SEQ ID NO: 20046
  GFR-binding peptide

SEQ ID NO: 83961 - protein, 38 aa, Artificial Sequence; identical to SEQ ID NO: 20047
  GFR-binding peptide
  MOD_RES (1), (35), (37): Xaa is C or S
  MOD_RES (15), (16), (17), (18), (19): Xaa is A or G
  MOD_RES (20), (21), (22), (23): Xaa is A or G or is absent

SEQ ID NO: 83962 - protein, 39 aa, Artificial Sequence; identical to SEQ ID NO: 54799
  GFR-binding peptide
  MOD_RES (2), (3), (36), (38): Xaa is C or S
  MOD_RES (17), (18), (19), (20), (21): Xaa is A or G
  MOD_RES (22), (23), (24), (25): Xaa is A or G or is absent

SEQ ID NO: 83963 - protein, 37 aa, Artificial Sequence; identical to SEQ ID NO: 19332
  GFR-binding peptide
  MOD_RES (2), (2): Xaa is C or S

SEQ ID NO: 83964 - protein, 39 aa, Artificial Sequence; identical to SEQ ID NO: 19334
  GFR-binding peptide
  MOD_RES (37), (39): Xaa is C or S
  MOD_RES (16), (17), (18), (19), (20): Xaa is A or G
  MOD_RES (21), (22), (23), (24): Xaa is A or G or is absent

SEQ ID NO: 83965 - protein, 43 aa, Artificial Sequence; identical to SEQ ID NO: 19335
  GFR-binding peptide
  MOD_RES (4), (41), (43): Xaa is C or S

SEQ ID NO: 83966 - protein, 41 aa, Artificial Sequence; identical to SEQ ID NO: 19336
  GFR-binding peptide
  MOD_RES (2), (39), (41): Xaa is C or S
  MOD_RES (18), (19), (20), (21), (22): Xaa is A or G
  MOD_RES (23), (24), (25), (26): Xaa is A or G or is absent

SEQ ID NO: 83967 - protein, 38 aa, Artificial Sequence; identical to SEQ ID NO: 20051
  GFR-binding peptide
  MOD_RES (4), (38): Xaa is C or S

SEQ ID NO: 83968 - protein, 42 aa, Artificial Sequence; identical to SEQ ID NO: 20052
  GFR-binding peptide
  MOD_RES (3), (40), (42): Xaa is C or S

SEQ ID NO: 83969 - protein, 40 aa, Artificial Sequence; identical to SEQ ID NO: 53606
  GFR-binding peptide
  MOD_RES (5), (6), (39): Xaa is C or S
  MOD_RES (20), (21), (22), (23), (24): Xaa is A or G
  MOD_RES (25), (26), (27), (28): Xaa is A or G or is absent

SEQ ID NO: 83970 - protein, 41 aa, Artificial Sequence; identical to SEQ ID NO: 20053
  GFR-binding peptide
  MOD_RES (7), (41): Xaa is C or S

SEQ ID NO: 83971 - protein, 40 aa, Artificial Sequence; identical to SEQ ID NO: 20054
  GFR-binding peptide
  MOD_RES (5), (5): Xaa is C or S
  MOD_RES (21), (22), (23), (24), (25): Xaa is A or G
  MOD_RES (26), (27), (28), (29): Xaa is A or G or is absent

SEQ ID NO: 83972 - protein, 39 aa, Artificial Sequence; identical to SEQ ID NO: 20055
  GFR-binding peptide
  MOD_RES (4), (4): Xaa is C or S
  MOD_RES (20), (21), (22), (23), (24): Xaa is A or G
  MOD_RES (25), (26), (27), (28): Xaa is A or G or is absent

SEQ ID NO: 83973 - protein, 36 aa, Artificial Sequence; identical to SEQ ID NO: 19337
  GFR-binding peptide
  MOD_RES (3), (3): Xaa is C or S
  MOD_RES (17), (18), (19), (20), (21): Xaa is A or G
  MOD_RES (22), (23), (24), (25): Xaa is A or G or is absent

SEQ ID NO: 83974 - protein, 35 aa, Artificial Sequence; identical to SEQ ID NO: 19338
  GFR-binding peptide
  MOD_RES (34), (34): Xaa is C or S
  MOD_RES (14), (15), (16), (17), (18): Xaa is A or G
  MOD_RES (19), (20), (21), (22): Xaa is A or G or is absent

SEQ ID NO: 83975 - protein, 37 aa, Artificial Sequence; identical to SEQ ID NO: 56004
  GFR-binding peptide
  MOD_RES (4), (5): Xaa is C or S
  MOD_RES (19), (20), (21), (22), (23): Xaa is A or G
  MOD_RES (24), (25), (26), (27): Xaa is A or G or is absent

SEQ ID NO: 83976 - protein, 33 aa, Artificial Sequence; identical to SEQ ID NO: 53618
  GFR-binding peptide
  MOD_RES (2), (3): Xaa is C or S

SEQ ID NO: 83977 - protein, 41 aa, Artificial Sequence; identical to SEQ ID NO: 19341
  GFR-binding peptide
  MOD_RES (6), (40): Xaa is C or S

SEQ ID NO: 83978 - protein, 38 aa, Artificial Sequence; identical to SEQ ID NO: 54814
  GFR-binding peptide
  MOD_RES (2), (3), (36), (38): Xaa is C or S
  MOD_RES (17), (18), (19), (20), (21): Xaa is A or G
  MOD_RES (22), (23), (24), (25): Xaa is A or G or is absent

SEQ ID NO: 83979 - protein, 32 aa, Artificial Sequence; identical to SEQ ID NO: 56007
  GFR-binding peptide
  MOD_RES (31), (31): Xaa is C or S

SEQ ID NO: 83980 - protein, 37 aa, Artificial Sequence; identical to SEQ ID NO: 56013
  GFR-binding peptide
  MOD_RES (5), (6), (37): Xaa is C or S

SEQ ID NO: 83981 - protein, 32 aa, Artificial Sequence; identical to SEQ ID NO: 53623
  GFR-binding peptide
  MOD_RES (1), (2): Xaa is C or S

SEQ ID NO: 83982 - protein, 35 aa, Artificial Sequence; identical to SEQ ID NO: 20063
  GFR-binding peptide
  MOD_RES (1), (35): Xaa is C or S

SEQ ID NO: 83983 - protein, 38 aa, Artificial Sequence; identical to SEQ ID NO: 19342
  GFR-binding peptide
  MOD_RES (2), (2): Xaa is C or S
  MOD_RES (18), (19), (20), (21), (22): Xaa is A or G
  MOD_RES (23), (24), (25), (26): Xaa is A or G or is absent

SEQ ID NO: 83984 - protein, 39 aa, Artificial Sequence; identical to SEQ ID NO: 54819
  GFR-binding peptide
  MOD_RES (6), (7): Xaa is C or S
  MOD_RES (21), (22), (23), (24), (25): Xaa is A or G
  MOD_RES (26), (27), (28), (29): Xaa is A or G or is absent

SEQ ID NO: 83985 - protein, 36 aa, Artificial Sequence; identical to SEQ ID NO: 19343
  GFR-binding peptide
  MOD_RES (4), (4): Xaa is C or S

SEQ ID NO: 83986 - protein, 36 aa, Artificial Sequence; identical to SEQ ID NO: 53628
  GFR-binding peptide
  MOD_RES (3), (4): Xaa is C or S
  MOD_RES (18), (19), (20), (21), (22): Xaa is A or G
  MOD_RES (23), (24), (25), (26): Xaa is A or G or is absent

SEQ ID NO: 83987 - protein, 41 aa, Artificial Sequence; identical to SEQ ID NO: 20066
  GFR-binding peptide
  MOD_RES (2), (39), (41): Xaa is C or S

SEQ ID NO: 83988 - protein, 36 aa, Artificial Sequence; identical to SEQ ID NO: 54820
  GFR-binding peptide
  MOD_RES (3), (4), (35): Xaa is C or S

SEQ ID NO: 83989 - protein, 35 aa, Artificial Sequence; identical to SEQ ID NO: 19345
  GFR-binding peptide
  MOD_RES (1), (35): Xaa is C or S
  MOD_RES (15), (16), (17), (18), (19): Xaa is A or G
  MOD_RES (20), (21), (22), (23): Xaa is A or G or is absent

SEQ ID NO: 83990 - protein, 42 aa, Artificial Sequence; identical to SEQ ID NO: 54821
  GFR-binding peptide
  MOD_RES (5), (6), (39), (41): Xaa is C or S
  MOD_RES (20), (21), (22), (23), (24): Xaa is A or G
  MOD_RES (25), (26), (27), (28): Xaa is A or G or is absent

SEQ ID NO: 83991 - protein, 37 aa, Artificial Sequence; identical to SEQ ID NO: 20067
  GFR-binding peptide
  MOD_RES (34), (36): Xaa is C or S

SEQ ID NO: 83992 - protein, 31 aa, Artificial Sequence; identical to SEQ ID NO: 56020
  GFR-binding peptide
  MOD_RES (1), (1): Xaa is C or S

SEQ ID NO: 83993 - protein, 37 aa, Artificial Sequence; identical to SEQ ID NO: 20068
  GFR-binding peptide
  MOD_RES (2), (36): Xaa is C or S

SEQ ID NO: 83994 - protein, 41 aa, Artificial Sequence; identical to SEQ ID NO: 54826
  GFR-binding peptide
  MOD_RES (4), (5), (38), (40): Xaa is C or S
  MOD_RES (19), (20), (21), (22), (23): Xaa is A or G
  MOD_RES (24), (25), (26), (27): Xaa is A or G or is absent

SEQ ID NO: 83995 - protein, 36 aa, Artificial Sequence; identical to SEQ ID NO: 52463
  GFR-binding peptide
  MOD_RES (1), (2), (35): Xaa is C or S
  MOD_RES (16), (17), (18), (19), (20): Xaa is A or G
  MOD_RES (21), (22), (23), (24): Xaa is A or G or is absent

SEQ ID NO: 83996 - protein, 40 aa, Artificial Sequence; identical to SEQ ID NO: 19346
  GFR-binding peptide
  MOD_RES (3), (40): Xaa is C or S
  MOD_RES (19), (20), (21), (22), (23): Xaa is A or G
  MOD_RES (24), (25), (26), (27): Xaa is A or G or is absent

SEQ ID NO: 83997 - protein, 33 aa, Artificial Sequence; identical to SEQ ID NO: 20071
  GFR-binding peptide
  MOD_RES (14), (15), (16), (17), (18): Xaa is A or G
  MOD_RES (19), (20), (21), (22): Xaa is A or G or is absent

SEQ ID NO: 83998 - protein, 38 aa, Artificial Sequence; identical to SEQ ID NO: 19348
  GFR-binding peptide
  MOD_RES (2), (36), (38): Xaa is C or S

SEQ ID NO: 83999 - protein, 34 aa, Artificial Sequence; identical to SEQ ID NO: 19350
  GFR-binding peptide
  MOD_RES (34), (34): Xaa is C or S

SEQ ID NO: 84000 - protein, 36 aa, Artificial Sequence; identical to SEQ ID NO: 54834
  GFR-binding peptide
  MOD_RES (4), (5), (36): Xaa is C or S

SEQ ID NO: 84001 - protein, 37 aa, Artificial Sequence; identical to SEQ ID NO: 19351
  GFR-binding peptide
  MOD_RES (2), (2): Xaa is C or S

SEQ ID NO: 84002 - protein, 39 aa, Artificial Sequence; identical to SEQ ID NO: 20075
  GFR-binding peptide
  MOD_RES (36), (38): Xaa is C or S
  MOD_RES (15), (16), (17), (18), (19): Xaa is A or G
  MOD_RES (20), (21), (22), (23): Xaa is A or G or is absent

SEQ ID NO: 84003 - protein, 41 aa, Artificial Sequence; identical to SEQ ID NO: 54835
  GFR-binding peptide
  MOD_RES (6), (7), (40): Xaa is C or S
  MOD_RES (21), (22), (23), (24), (25): Xaa is A or G
  MOD_RES (26), (27), (28), (29): Xaa is A or G or is absent

SEQ ID NO: 84004 - protein, 35 aa, Artificial Sequence; identical to SEQ ID NO: 52471
  GFR-binding peptide
  MOD_RES (3), (4), (35): Xaa is C or S

SEQ ID NO: 84005 - protein, 38 aa, Artificial Sequence; identical to SEQ ID NO: 53654
  GFR-binding peptide
  MOD_RES (5), (6), (37): Xaa is C or S

SEQ ID NO: 84006 - protein, 35 aa, Artificial Sequence; identical to SEQ ID NO: 19353
  GFR-binding peptide
  MOD_RES (35), (35): Xaa is C or S
  MOD_RES (14), (15), (16), (17), (18): Xaa is A or G
  MOD_RES (19), (20), (21), (22): Xaa is A or G or is absent

SEQ ID NO: 84007 - protein, 37 aa, Artificial Sequence; identical to SEQ ID NO: 20079
  GFR-binding peptide
  MOD_RES (2), (36): Xaa is C or S

SEQ ID NO: 84008 - protein, 43 aa, Artificial Sequence; identical to SEQ ID NO: 20080
  GFR-binding peptide
  MOD_RES (3), (40), (42): Xaa is C or S
  MOD_RES (19), (20), (21), (22), (23): Xaa is A or G
  MOD_RES (24), (25), (26), (27): Xaa is A or G or is absent

SEQ ID NO: 84009 - protein, 37 aa, Artificial Sequence; identical to SEQ ID NO: 56037
  GFR-binding peptide
  MOD_RES (3), (4), (37): Xaa is C or S
  MOD_RES (18), (19), (20), (21), (22): Xaa is A or G
  MOD_RES (23), (24), (25), (26): Xaa is A or G or is absent

SEQ ID NO: 84010 - protein, 40 aa, Artificial Sequence; identical to SEQ ID NO: 19356
  GFR-binding peptide
  MOD_RES (3), (37), (39): Xaa is C or S

SEQ ID NO: 84011 - protein, 39 aa, Artificial Sequence; identical to SEQ ID NO: 54844
  GFR-binding peptide
  MOD_RES (6), (7), (38): Xaa is C or S

SEQ ID NO: 84012 - protein, 43 aa, Artificial Sequence; identical to SEQ ID NO: 19357
  GFR-binding peptide
  MOD_RES (7), (41), (43): Xaa is C or S
  MOD_RES (21), (22), (23), (24), (25): Xaa is A or G
  MOD_RES (26), (27), (28), (29): Xaa is A or G or is absent

SEQ ID NO: 84013 - protein, 41 aa, Artificial Sequence; identical to SEQ ID NO: 20082
  GFR-binding peptide
  MOD_RES (4), (38), (40): Xaa is C or S

SEQ ID NO: 84014 - protein, 36 aa, Artificial Sequence; identical to SEQ ID NO: 53667
  GFR-binding peptide
  MOD_RES (3), (4): Xaa is C or S
  MOD_RES (18), (19), (20), (21), (22): Xaa is A or G
  MOD_RES (23), (24), (25), (26): Xaa is A or G or is absent

SEQ ID NO: 84015 - protein, 39 aa, Artificial Sequence; identical to SEQ ID NO: 52481
  GFR-binding peptide
  MOD_RES (6), (7): Xaa is C or S
  MOD_RES (21), (22), (23), (24), (25): Xaa is A or G
  MOD_RES (26), (27), (28), (29): Xaa is A or G or is absent

SEQ ID NO: 84016 - protein, 39 aa, Artificial Sequence; identical to SEQ ID NO: 52482
  GFR-binding peptide
  MOD_RES (5), (6), (37), (39): Xaa is C or S

SEQ ID NO: 84017 - protein, 40 aa, Artificial Sequence; identical to SEQ ID NO: 20084
  GFR-binding peptide
  MOD_RES (3), (37), (39): Xaa is C or S

SEQ ID NO: 84018 - protein, 37 aa, Artificial Sequence; identical to SEQ ID NO: 56042
  GFR-binding peptide
  MOD_RES (4), (5): Xaa is C or S
  MOD_RES (19), (20), (21), (22), (23): Xaa is A or G
  MOD_RES (24), (25), (26), (27): Xaa is A or G or is absent

SEQ ID NO: 84019 - protein, 39 aa, Artificial Sequence; identical to SEQ ID NO: 20085
  GFR-binding peptide
  MOD_RES (37), (39): Xaa is C or S

SEQ ID NO: 84020 - protein, 37 aa, Artificial Sequence; identical to SEQ ID NO: 19359
  GFR-binding peptide
  MOD_RES (36), (36): Xaa is C or S

SEQ ID NO: 84021 - protein, 39 aa, Artificial Sequence; identical to SEQ ID NO: 20087
  GFR-binding peptide
  MOD_RES (3), (3): Xaa is C or S

SEQ ID NO: 84022 - protein, 40 aa, Artificial Sequence; identical to SEQ ID NO: 20088
  GFR-binding peptide
  MOD_RES (7), (7): Xaa is C or S

SEQ ID NO: 84023 - protein, 44 aa, Artificial Sequence; identical to SEQ ID NO: 19361
  GFR-binding peptide
  MOD_RES (7), (41), (43): Xaa is C or S

SEQ ID NO: 84024 - protein, 39 aa, Artificial Sequence; identical to SEQ ID NO: 19362
  GFR-binding peptide
  MOD_RES (3), (37), (39): Xaa is C or S
  MOD_RES (17), (18), (19), (20), (21): Xaa is A or G
  MOD_RES (22), (23), (24), (25): Xaa is A or G or is absent

SEQ ID NO: 84025 - protein, 39 aa, Artificial Sequence; identical to SEQ ID NO: 20090
  GFR-binding peptide
  MOD_RES (3), (37), (39): Xaa is C or S
  MOD_RES (17), (18), (19), (20), (21): Xaa is A or G
  MOD_RES (22), (23), (24), (25): Xaa is A or G or is absent

SEQ ID NO: 84026 - protein, 38 aa, Artificial Sequence; identical to SEQ ID NO: 54862
  GFR-binding peptide
  MOD_RES (5), (6): Xaa is C or S
  MOD_RES (20), (21), (22), (23), (24): Xaa is A or G
  MOD_RES (25), (26), (27), (28): Xaa is A or G or is absent

SEQ ID NO: 84027 - protein, 35 aa, Artificial Sequence; identical to SEQ ID NO: 20093
  GFR-binding peptide
  MOD_RES (16), (17), (18), (19), (20): Xaa is A or G
  MOD_RES (21), (22), (23), (24): Xaa is A or G or is absent

SEQ ID NO: 84028 - protein, 41 aa, Artificial Sequence; identical to SEQ ID NO: 20094
  GFR-binding peptide
  MOD_RES (3), (40): Xaa is C or S
  MOD_RES (19), (20), (21), (22), (23): Xaa is A or G
  MOD_RES (24), (25), (26), (27): Xaa is A or G or is absent

SEQ ID NO: 84029 - protein, 43 aa, Artificial Sequence; identical to SEQ ID NO: 20095
  GFR-binding peptide
  MOD_RES (4), (41), (43): Xaa is C or S
  MOD_RES (20), (21), (22), (23), (24): Xaa is A or G
  MOD_RES (25), (26), (27), (28): Xaa is A or G or is absent

SEQ ID NO: 84030 - protein, 31 aa, Artificial Sequence; identical to SEQ ID NO: 56048
  GFR-binding peptide
  MOD_RES (31), (31): Xaa is C or S

SEQ ID NO: 84031 - protein, 38 aa, Artificial Sequence; identical to SEQ ID NO: 20099
  GFR-binding peptide
  MOD_RES (3), (37): Xaa is C or S

SEQ ID NO: 84032 - protein, 38 aa, Artificial Sequence; identical to SEQ ID NO: 54872
  GFR-binding peptide
  MOD_RES (6), (7), (38): Xaa is C or S

SEQ ID NO: 84033 - protein, 35 aa, Artificial Sequence; identical to SEQ ID NO: 54873
  GFR-binding peptide
  MOD_RES (1), (2), (33), (35): Xaa is C or S

SEQ ID NO: 84034 - protein, 41 aa, Artificial Sequence; identical to SEQ ID NO: 20102
  GFR-binding peptide
  MOD_RES (1), (38), (40): Xaa is C or S
  MOD_RES (17), (18), (19), (20), (21): Xaa is A or G
  MOD_RES (22), (23), (24), (25): Xaa is A or G or is absent

SEQ ID NO: 84035 - protein, 33 aa, Artificial Sequence; identical to SEQ ID NO: 56060
  GFR-binding peptide
  MOD_RES (2), (3): Xaa is C or S

SEQ ID NO: 84036 - protein, 33 aa, Artificial Sequence; identical to SEQ ID NO: 56063
  GFR-binding peptide
  MOD_RES (33), (33): Xaa is C or S
  MOD_RES (14), (15), (16), (17), (18): Xaa is A or G
  MOD_RES (19), (20), (21), (22): Xaa is A or G or is absent

SEQ ID NO: 84037 - protein, 34 aa, Artificial Sequence; identical to SEQ ID NO: 20104
  GFR-binding peptide
  MOD_RES (1), (1): Xaa is C or S
  MOD_RES (15), (16), (17), (18), (19): Xaa is A or G
  MOD_RES (20), (21), (22), (23): Xaa is A or G or is absent

SEQ ID NO: 84038 - protein, 37 aa, Artificial Sequence; identical to SEQ ID NO: 19372
  GFR-binding peptide
  MOD_RES (4), (4): Xaa is C or S

SEQ ID NO: 84039 - protein, 41 aa, Artificial Sequence; identical to SEQ ID NO: 20105
  GFR-binding peptide
  MOD_RES (4), (38), (40): Xaa is C or S
  MOD_RES (18), (19), (20), (21), (22): Xaa is A or G
  MOD_RES (23), (24), (25), (26): Xaa is A or G or is absent

SEQ ID NO: 84040 - protein, 37 aa, Artificial Sequence; identical to SEQ ID NO: 19373
  GFR-binding peptide
  MOD_RES (3), (37): Xaa is C or S

SEQ ID NO: 84041 - protein, 36 aa, Artificial Sequence; identical to SEQ ID NO: 56066
  GFR-binding peptide
  MOD_RES (1), (34), (36): Xaa is C or S
  MOD_RES (15), (16), (17), (18), (19): Xaa is A or G
  MOD_RES (20), (21), (22), (23): Xaa is A or G or is absent

SEQ ID NO: 84042 - protein, 35 aa, Artificial Sequence; identical to SEQ ID NO: 20107
  GFR-binding peptide
  MOD_RES (1), (35): Xaa is C or S
  MOD_RES (15), (16), (17), (18), (19): Xaa is A or G
  MOD_RES (20), (21), (22), (23): Xaa is A or G or is absent

SEQ ID NO: 84043 - protein, 38 aa, Artificial Sequence; identical to SEQ ID NO: 20109
  GFR-binding peptide
  MOD_RES (4), (38): Xaa is C or S
  MOD_RES (18), (19), (20), (21), (22): Xaa is A or G
  MOD_RES (23), (24), (25), (26): Xaa is A or G or is absent

SEQ ID NO: 84044 - protein, 41 aa, Artificial Sequence; identical to SEQ ID NO: 54884
  GFR-binding peptide
  MOD_RES (6), (7), (40): Xaa is C or S
  MOD_RES (21), (22), (23), (24), (25): Xaa is A or G
  MOD_RES (26), (27), (28), (29): Xaa is A or G or is absent

SEQ ID NO: 84045 - protein, 37 aa, Artificial Sequence; identical to SEQ ID NO: 19374
  GFR-binding peptide
  MOD_RES (34), (36): Xaa is C or S

SEQ ID NO: 84046 - protein, 36 aa, Artificial Sequence; identical to SEQ ID NO: 52513
  GFR-binding peptide
  MOD_RES (1), (34), (36): Xaa is C or S
  MOD_RES (15), (16), (17), (18), (19): Xaa is A or G
  MOD_RES (20), (21), (22), (23): Xaa is A or G or is absent

SEQ ID NO: 84047 - protein, 40 aa, Artificial Sequence; identical to SEQ ID NO: 20110
  GFR-binding peptide
  MOD_RES (5), (5): Xaa is C or S

SEQ ID NO: 84048 - protein, 40 aa, Artificial Sequence; identical to SEQ ID NO: 54887
  GFR-binding peptide
  MOD_RES (5), (6), (39): Xaa is C or S
  MOD_RES (20), (21), (22), (23), (24): Xaa is A or G
  MOD_RES (25), (26), (27), (28): Xaa is A or G or is absent

SEQ ID NO: 84049 - protein, 39 aa, Artificial Sequence; identical to SEQ ID NO: 52518
  GFR-binding peptide
  MOD_RES (5), (6), (37), (39): Xaa is C or S

SEQ ID NO: 84050 - protein, 39 aa, Artificial Sequence; identical to SEQ ID NO: 54889
  GFR-binding peptide
  MOD_RES (3), (4), (37), (39): Xaa is C or S
  MOD_RES (18), (19), (20), (21), (22): Xaa is A or G
  MOD_RES (23), (24), (25), (26): Xaa is A or G or is absent

SEQ ID NO: 84051 - protein, 42 aa, Artificial Sequence; identical to SEQ ID NO: 53711
  GFR-binding peptide
  MOD_RES (6), (7), (40), (42): Xaa is C or S
  MOD_RES (21), (22), (23), (24), (25): Xaa is A or G
  MOD_RES (26), (27), (28), (29): Xaa is A or G or is absent

SEQ ID NO: 84052 - protein, 37 aa, Artificial Sequence; identical to SEQ ID NO: 52522
  GFR-binding peptide
  MOD_RES (3), (4), (35), (37): Xaa is C or S

SEQ ID NO: 84053 - protein, 37 aa, Artificial Sequence; identical to SEQ ID NO: 56081
  GFR-binding peptide
  MOD_RES (5), (6), (37): Xaa is C or S

SEQ ID NO: 84054 - protein, 41 aa, Artificial Sequence; identical to SEQ ID NO: 20116
  GFR-binding peptide
  MOD_RES (4), (41): Xaa is C or S

SEQ ID NO: 84055 - protein, 36 aa, Artificial Sequence; identical to SEQ ID NO: 20117
  GFR-binding peptide
  MOD_RES (3), (3): Xaa is C or S

SEQ ID NO: 84056 - protein, 38 aa, Artificial Sequence; identical to SEQ ID NO: 19381
  GFR-binding peptide
  MOD_RES (1), (35), (37): Xaa is C or S

SEQ ID NO: 84057 - protein, 40 aa, Artificial Sequence; identical to SEQ ID NO: 20118
  GFR-binding peptide
  MOD_RES (1), (38), (40): Xaa is C or S
  MOD_RES (17), (18), (19), (20), (21): Xaa is A or G
  MOD_RES (22), (23), (24), (25): Xaa is A or G or is absent

SEQ ID NO: 84058 - protein, 43 aa, Artificial Sequence; identical to SEQ ID NO: 19383
  GFR-binding peptide
  MOD_RES (3), (40), (42): Xaa is C or S

SEQ ID NO: 84059 - protein, 42 aa, Artificial Sequence; identical to SEQ ID NO: 19384
  GFR-binding peptide
  MOD_RES (2), (39), (41): Xaa is C or S
  MOD_RES (18), (19), (20), (21), (22): Xaa is A or G
  MOD_RES (23), (24), (25), (26): Xaa is A or G or is absent

SEQ ID NO: 84060 - protein, 40 aa, Artificial Sequence; identical to SEQ ID NO: 54903
  GFR-binding peptide
  MOD_RES (6), (7), (40): Xaa is C or S
  MOD_RES (21), (22), (23), (24), (25): Xaa is A or G
  MOD_RES (26), (27), (28), (29): Xaa is A or G or is absent

SEQ ID NO: 84061 - protein, 37 aa, Artificial Sequence; identical to SEQ ID NO: 20120
  GFR-binding peptide
  MOD_RES (34), (36): Xaa is C or S
  MOD_RES (14), (15), (16), (17), (18): Xaa is A or G
  MOD_RES (19), (20), (21), (22): Xaa is A or G or is absent

SEQ ID NO: 84062 - protein, 41 aa, Artificial Sequence; identical to SEQ ID NO: 53721
  GFR-binding peptide
  MOD_RES (6), (7), (40): Xaa is C or S
  MOD_RES (21), (22), (23), (24), (25): Xaa is A or G
  MOD_RES (26), (27), (28), (29): Xaa is A or G or is absent

SEQ ID NO: 84063 - protein, 38 aa, Artificial Sequence; identical to SEQ ID NO: 56089
  GFR-binding peptide
  MOD_RES (5), (6), (37): Xaa is C or S

SEQ ID NO: 84064 - protein, 34 aa, Artificial Sequence; identical to SEQ ID NO: 56090
  GFR-binding peptide
  MOD_RES (2), (3), (34): Xaa is C or S

SEQ ID NO: 84065 - protein, 32 aa, Artificial Sequence; identical to SEQ ID NO: 20121
  GFR-binding peptide
  MOD_RES (14), (15), (16), (17), (18): Xaa is A or G
  MOD_RES (19), (20), (21), (22): Xaa is A or G or is absent

SEQ ID NO: 84066 - protein, 31 aa, Artificial Sequence; identical to SEQ ID NO: 53725
  GFR-binding peptide
  MOD_RES (1), (1): Xaa is C or S

SEQ ID NO: 84067 - protein, 37 aa, Artificial Sequence; identical to SEQ ID NO: 20122
  GFR-binding peptide
  MOD_RES (35), (37): Xaa is C or S
  MOD_RES (14), (15), (16), (17), (18): Xaa is A or G
  MOD_RES (19), (20), (21), (22): Xaa is A or G or is absent

SEQ ID NO: 84068 - protein, 42 aa, Artificial Sequence; identical to SEQ ID NO: 19389
  GFR-binding peptide
  MOD_RES (5), (42): Xaa is C or S
  MOD_RES (21), (22), (23), (24), (25): Xaa is A or G
  MOD_RES (26), (27), (28), (29): Xaa is A or G or is absent

SEQ ID NO: 84069 - protein, 40 aa, Artificial Sequence; identical to SEQ ID NO: 20123
  GFR-binding peptide
  MOD_RES (4), (38), (40): Xaa is C or S
  MOD_RES (18), (19), (20), (21), (22): Xaa is A or G
  MOD_RES (23), (24), (25), (26): Xaa is A or G or is absent

SEQ ID NO: 84070 - protein, 36 aa, Artificial Sequence; identical to SEQ ID NO: 54905
  GFR-binding peptide
  MOD_RES (2), (3), (34), (36): Xaa is C or S

SEQ ID NO: 84071 - protein, 39 aa, Artificial Sequence; identical to SEQ ID NO: 19390
  GFR-binding peptide
  MOD_RES (1), (38): Xaa is C or S

SEQ ID NO: 84072 - protein, 37 aa, Artificial Sequence; identical to SEQ ID NO: 56093
  GFR-binding peptide
  MOD_RES (3), (4), (35), (37): Xaa is C or S

SEQ ID NO: 84073 - protein, 38 aa, Artificial Sequence; identical to SEQ ID NO: 19391
  GFR-binding peptide
  MOD_RES (1), (38): Xaa is C or S
  MOD_RES (17), (18), (19), (20), (21): Xaa is A or G
  MOD_RES (22), (23), (24), (25): Xaa is A or G or is absent

SEQ ID NO: 84074 - protein, 34 aa, Artificial Sequence; identical to SEQ ID NO: 20125
  GFR-binding peptide
  MOD_RES (34), (34): Xaa is C or S
  MOD_RES (14), (15), (16), (17), (18): Xaa is A or G
  MOD_RES (19), (20), (21), (22): Xaa is A or G or is absent

SEQ ID NO: 84075 - protein, 37 aa, Artificial Sequence; identical to SEQ ID NO: 52542
  GFR-binding peptide
  MOD_RES (2), (3), (34), (36): Xaa is C or S

SEQ ID NO: 84076 - protein, 36 aa, Artificial Sequence; identical to SEQ ID NO: 54909
  GFR-binding peptide
  MOD_RES (2), (3), (36): Xaa is C or S
  MOD_RES (17), (18), (19), (20), (21): Xaa is A or G
  MOD_RES (22), (23), (24), (25): Xaa is A or G or is absent

SEQ ID NO: 84077 - protein, 37 aa, Artificial Sequence; identical to SEQ ID NO: 56098
  GFR-binding peptide
  MOD_RES (3), (4), (35), (37): Xaa is C or S

SEQ ID NO: 84078 - protein, 38 aa, Artificial Sequence; identical to SEQ ID NO: 20129
  GFR-binding peptide
  MOD_RES (2), (36), (38): Xaa is C or S
  MOD_RES (16), (17), (18), (19), (20): Xaa is A or G
  MOD_RES (21), (22), (23), (24): Xaa is A or G or is absent

SEQ ID NO: 84079 - protein, 38 aa, Artificial Sequence; identical to SEQ ID NO: 19397
  GFR-binding peptide
  MOD_RES (1), (38): Xaa is C or S
  MOD_RES (17), (18), (19), (20), (21): Xaa is A or G
  MOD_RES (22), (23), (24), (25): Xaa is A or G or is absent

SEQ ID NO: 84080 - protein, 42 aa, Artificial Sequence; identical to SEQ ID NO: 19398
  GFR-binding peptide
  MOD_RES (4), (41): Xaa is C or S

SEQ ID NO: 84081 - protein, 39 aa, Artificial Sequence; identical to SEQ ID NO: 20131
  GFR-binding peptide
  MOD_RES (4), (38): Xaa is C or S
  MOD_RES (18), (19), (20), (21), (22): Xaa is A or G
  MOD_RES (23), (24), (25), (26): Xaa is A or G or is absent

SEQ ID NO: 84082 - protein, 35 aa, Artificial Sequence; identical to SEQ ID NO: 56102
  GFR-binding peptide
  MOD_RES (2), (3), (34): Xaa is C or S

SEQ ID NO: 84083 - protein, 36 aa, Artificial Sequence; identical to SEQ ID NO: 20132
  GFR-binding peptide
  MOD_RES (1), (1): Xaa is C or S
  MOD_RES (17), (18), (19), (20), (21): Xaa is A or G
  MOD_RES (22), (23), (24), (25): Xaa is A or G or is absent

SEQ ID NO: 84084 - protein, 38 aa, Artificial Sequence; identical to SEQ ID NO: 56105
  GFR-binding peptide
  MOD_RES (6), (7), (38): Xaa is C or S

SEQ ID NO: 84085 - protein, 35 aa, Artificial Sequence; identical to SEQ ID NO: 54924
  GFR-binding peptide
  MOD_RES (1), (2), (35): Xaa is C or S
  MOD_RES (16), (17), (18), (19), (20): Xaa is A or G
  MOD_RES (21), (22), (23), (24): Xaa is A or G or is absent

SEQ ID NO: 84086 - protein, 39 aa, Artificial Sequence; identical to SEQ ID NO: 19402
  GFR-binding peptide
  MOD_RES (6), (6): Xaa is C or S
  MOD_RES (20), (21), (22), (23), (24): Xaa is A or G
  MOD_RES (25), (26), (27), (28): Xaa is A or G or is absent

SEQ ID NO: 84087 - protein, 43 aa, Artificial Sequence; identical to SEQ ID NO: 56106
  GFR-binding peptide
  MOD_RES (6), (7), (40), (42): Xaa is C or S
  MOD_RES (21), (22), (23), (24), (25): Xaa is A or G
  MOD_RES (26), (27), (28), (29): Xaa is A or G or is absent

SEQ ID NO: 84088 - protein, 41 aa, Artificial Sequence; identical to SEQ ID NO: 20134
  GFR-binding peptide
  MOD_RES (6), (40): Xaa is C or S
  MOD_RES (20), (21), (22), (23), (24): Xaa is A or G
  MOD_RES (25), (26), (27), (28): Xaa is A or G or is absent

SEQ ID NO: 84089 - protein, 34 aa, Artificial Sequence; identical to SEQ ID NO: 20136
  GFR-binding peptide
  MOD_RES (34), (34): Xaa is C or S

SEQ ID NO: 84090 - protein, 34 aa, Artificial Sequence; identical to SEQ ID NO: 53743
  GFR-binding peptide
  MOD_RES (1), (34): Xaa is C or S
  MOD_RES (15), (16), (17), (18), (19): Xaa is A or G
  MOD_RES (20), (21), (22), (23): Xaa is A or G or is absent

SEQ ID NO: 84091 - protein, 41 aa, Artificial Sequence; identical to SEQ ID NO: 20138
  GFR-binding peptide
  MOD_RES (5), (39), (41): Xaa is C or S
  MOD_RES (19), (20), (21), (22), (23): Xaa is A or G
  MOD_RES (24), (25), (26), (27): Xaa is A or G or is absent

SEQ ID NO: 84092 - protein, 38 aa, Artificial Sequence; identical to SEQ ID NO: 52567
  GFR-binding peptide
  MOD_RES (1), (2), (35), (37): Xaa is C or S
  MOD_RES (16), (17), (18), (19), (20): Xaa is A or G
  MOD_RES (21), (22), (23), (24): Xaa is A or G or is absent

SEQ ID NO: 84093 - protein, 39 aa, Artificial Sequence; identical to SEQ ID NO: 19403
  GFR-binding peptide
  MOD_RES (2), (36), (38): Xaa is C or S

SEQ ID NO: 84094 - protein, 37 aa, Artificial Sequence; identical to SEQ ID NO: 56114
  GFR-binding peptide
  MOD_RES (4), (5), (36): Xaa is C or S

SEQ ID NO: 84095 - protein, 38 aa, Artificial Sequence; identical to SEQ ID NO: 56118
  GFR-binding peptide
  MOD_RES (1), (2), (35), (37): Xaa is C or S
  MOD_RES (16), (17), (18), (19), (20): Xaa is A or G
  MOD_RES (21), (22), (23), (24): Xaa is A or G or is absent

SEQ ID NO: 84096 - protein, 42 aa, Artificial Sequence; identical to SEQ ID NO: 54930
  GFR-binding peptide
  MOD_RES (5), (6), (39), (41): Xaa is C or S
  MOD_RES (20), (21), (22), (23), (24): Xaa is A or G
  MOD_RES (25), (26), (27), (28): Xaa is A or G or is absent

SEQ ID NO: 84097 - protein, 35 aa, Artificial Sequence; identical to SEQ ID NO: 52575
  GFR-binding peptide
  MOD_RES (2), (3), (34): Xaa is C or S

SEQ ID NO: 84098 - protein, 37 aa, Artificial Sequence; identical to SEQ ID NO: 20143
  GFR-binding peptide
  MOD_RES (3), (37): Xaa is C or S

SEQ ID NO: 84099 - protein, 41 aa, Artificial Sequence; identical to SEQ ID NO: 20144
  GFR-binding peptide
  MOD_RES (7), (41): Xaa is C or S
  MOD_RES (21), (22), (23), (24), (25): Xaa is A or G
  MOD_RES (26), (27), (28), (29): Xaa is A or G or is absent

SEQ ID NO: 84100 - protein, 34 aa, Artificial Sequence; identical to SEQ ID NO: 53754
  GFR-binding peptide
  MOD_RES (31), (33): Xaa is C or S

SEQ ID NO: 84101 - protein, 38 aa, Artificial Sequence; identical to SEQ ID NO: 52576
  GFR-binding peptide
  MOD_RES (4), (5), (36), (38): Xaa is C or S

SEQ ID NO: 84102 - protein, 37 aa, Artificial Sequence; identical to SEQ ID NO: 19406
  GFR-binding peptide
  MOD_RES (2), (36): Xaa is C or S
  MOD_RES (16), (17), (18), (19), (20): Xaa is A or G
  MOD_RES (21), (22), (23), (24): Xaa is A or G or is absent

SEQ ID NO: 84103 - protein, 44 aa, Artificial Sequence; identical to SEQ ID NO: 19407
  GFR-binding peptide
  MOD_RES (7), (41), (43): Xaa is C or S
  MOD_RES (21), (22), (23), (24), (25): Xaa is A or G
  MOD_RES (26), (27), (28), (29): Xaa is A or G or is absent

SEQ ID NO: 84104 - protein, 37 aa, Artificial Sequence; identical to SEQ ID NO: 20145
  GFR-binding peptide
  MOD_RES (3), (37): Xaa is C or S
  MOD_RES (17), (18), (19), (20), (21): Xaa is A or G
  MOD_RES (22), (23), (24), (25): Xaa is A or G or is absent

SEQ ID NO: 84105 - protein, 40 aa, Artificial Sequence; identical to SEQ ID NO: 56125
  GFR-binding peptide
  MOD_RES (3), (4), (37), (39): Xaa is C or S
  MOD_RES (18), (19), (20), (21), (22): Xaa is A or G
  MOD_RES (23), (24), (25), (26): Xaa is A or G or is absent

SEQ ID NO: 84106 - protein, 38 aa, Artificial Sequence; identical to SEQ ID NO: 20148
  GFR-binding peptide
  MOD_RES (4), (4): Xaa is C or S
  MOD_RES (20), (21), (22), (23), (24): Xaa is A or G
  MOD_RES (25), (26), (27), (28): Xaa is A or G or is absent

SEQ ID NO: 84107 - protein, 40 aa, Artificial Sequence; identical to SEQ ID NO: 20149
  GFR-binding peptide
  MOD_RES (3), (37), (39): Xaa is C or S
  MOD_RES (17), (18), (19), (20), (21): Xaa is A or G
  MOD_RES (22), (23), (24), (25): Xaa is A or G or is absent

SEQ ID NO: 84108 - protein, 38 aa, Artificial Sequence; identical to SEQ ID NO: 20150
  GFR-binding peptide
  MOD_RES (37), (37): Xaa is C or S
  MOD_RES (16), (17), (18), (19), (20): Xaa is A or G
  MOD_RES (21), (22), (23), (24): Xaa is A or G or is absent

SEQ ID NO: 84109 - protein, 4 aa, Artificial Sequence
  Building block peptide "PEP"
EPIS

SEQ ID NO: 84110 - protein, 4 aa, Artificial Sequence
  Building block peptide "PEP"
EPLP

SEQ ID NO: 84111 - protein, 4 aa, Artificial Sequence
  Building block peptide "PEP"
EPLT

SEQ ID NO: 84112 - protein, 4 aa, Artificial Sequence
  Building block peptide "PEP"
KPLS

SEQ ID NO: 84113 - protein, 4 aa, Artificial Sequence
  Building block peptide "PEP"
NAIS

SEQ ID NO: 84114 - protein, 4 aa, Artificial Sequence
  Building block peptide "PEP"
RPVQ

SEQ ID NO: 84115 - protein, 4 aa, Artificial Sequence
  Building block peptide "PEP"
RSVK

SEQ ID NO: 84116 - protein, 4 aa, Artificial Sequence
  Building block peptide "PEP"
SAIS

SEQ ID NO: 84117 - protein, 4 aa, Artificial Sequence
  Building block peptide "PEP"
SATS

SEQ ID NO: 84118 - protein, 4 aa, Artificial Sequence
  Building block peptide "PEP"
SNIT

SEQ ID NO: 84119 - protein, 4 aa, Artificial Sequence
  Building block peptide "PEP"
SPIN

SEQ ID NO: 84120 - protein, 4 aa, Artificial Sequence
  Building block peptide "PEP"
SPIS

SEQ ID NO: 84121 - protein, 4 aa, Artificial Sequence
  Building block peptide "PEP"
SSLS

SEQ ID NO: 84122 - protein, 4 aa, Artificial Sequence
  Building block peptide "PEP"
  MOD_RES (1), (3): Xaa is C or S
XGXL

SEQ ID NO: 84123 - protein, 4 aa, Artificial Sequence
  Building block peptide "PEP"
  MOD_RES (1), (3): Xaa is C or S
XGXR

SEQ ID NO: 84124 - protein, 4 aa, Artificial Sequence
  Building block peptide "PEP"
  MOD_RES (1), (3): Xaa is C or S
XKXS

SEQ ID NO: 84125 - protein, 5 aa, Artificial Sequence
  Building block peptide "PEP"
APTAL

SEQ ID NO: 84126 - protein, 5 aa, Artificial Sequence
  Building block peptide "PEP"
APTDL

SEQ ID NO: 84127 - protein, 5 aa, Artificial Sequence
  Building block peptide "PEP"
APTEE

SEQ ID NO: 84128 - protein, 5 aa, Artificial Sequence
  Building block peptide "PEP"
APTEL

SEQ ID NO: 84129 - protein, 5 aa, Artificial Sequence
  Building block peptide "PEP"
APTGQ

SEQ ID NO: 84130 - protein, 5 aa, Artificial Sequence
  Building block peptide "PEP"
APTHH

SEQ ID NO: 84131 - protein, 5 aa, Artificial Sequence
  Building block peptide "PEP"
APTKL

SEQ ID NO: 84132 - protein, 5 aa, Artificial Sequence
  Building block peptide "PEP"
APTKM

SEQ ID NO: 84133 - protein, 5 aa, Artificial Sequence
  Building block peptide "PEP"
APTKT

SEQ ID NO: 84134 - protein, 5 aa, Artificial Sequence
  Building block peptide "PEP"
APTQL

SEQ ID NO: 84135 - protein, 5 aa, Artificial Sequence
  Building block peptide "PEP"
APTRL

SEQ ID NO: 84136 - protein, 5 aa, Artificial Sequence
  Building block peptide "PEP"
APVAL

SEQ ID NO: 84137 - protein, 5 aa, Artificial Sequence
  Building block peptide "PEP"
APVDL

SEQ ID NO: 84138 - protein, 5 aa, Artificial Sequence
  Building block peptide "PEP"
APVEE

SEQ ID NO: 84139 - protein, 5 aa, Artificial Sequence
  Building block peptide "PEP"
APVEL

SEQ ID NO: 84140 - protein, 5 aa, Artificial Sequence
  Building block peptide "PEP"
APVGQ

SEQ ID NO: 84141 - protein, 5 aa, Artificial Sequence
  Building block peptide "PEP"
APVHH

SEQ ID NO: 84142 - protein, 5 aa, Artificial Sequence
  Building block peptide "PEP"
APVKL

SEQ ID NO: 84143 - protein, 5 aa, Artificial Sequence
  Building block peptide "PEP"
APVKM

SEQ ID NO: 84144 - protein, 5 aa, Artificial Sequence
  Building block peptide "PEP"
APVKT

SEQ ID NO: 84145 - protein, 5 aa, Artificial Sequence
  Building block peptide "PEP"
APVQL

SEQ ID NO: 84146 - protein, 5 aa, Artificial Sequence
  Building block peptide "PEP"
APVRL

SEQ ID NO: 84147 - protein, 5 aa, Artificial Sequence
  Building block peptide "PEP"
  MOD_RES (2), (4): Xaa is C or S
AXGXH

SEQ ID NO: 84148 - protein, 5 aa, Artificial Sequence
  Building block peptide "PEP"
  MOD_RES (2), (4): Xaa is C or S
AXGXR

SEQ ID NO: 84149 - protein, 5 aa, Artificial Sequence
  Building block peptide "PEP"
DHHKD

SEQ ID NO: 84150 - protein, 5 aa, Artificial Sequence
  Building block peptide "PEP"
DMAVS

SEQ ID NO: 84151 - protein, 5 aa, Artificial Sequence
  Building block peptide "PEP"
DMEDH

SEQ ID NO: 84152 - protein, 5 aa, Artificial Sequence
  Building block peptide "PEP"
DMEEH

SEQ ID NO: 84153 - protein, 5 aa, Artificial Sequence
  Building block peptide "PEP"
DMEHS

SEQ ID NO: 84154 - protein, 5 aa, Artificial Sequence
  Building block peptide "PEP"
DMQHN

SEQ ID NO: 84155 - protein, 5 aa, Artificial Sequence
  Building block peptide "PEP"
DMTVE

SEQ ID NO: 84156 - protein, 5 aa, Artificial Sequence
  Building block peptide "PEP"
DMVAE

SEQ ID NO: 84157 - protein, 5 aa, Artificial Sequence
  Building block peptide "PEP"
DMVEE

SEQ ID NO: 84158 - protein, 5 aa, Artificial Sequence
  Building block peptide "PEP"
DMVKS

SEQ ID NO: 84159 - protein, 5 aa, Artificial Sequence
  Building block peptide "PEP"
DMVRS

SEQ ID NO: 84160 - protein, 5 aa, Artificial Sequence
  Building block peptide "PEP"
DMVVD

SEQ ID NO: 84161 - protein, 5 aa, Artificial Sequence
  Building block peptide "PEP"
DMVVE

SEQ ID NO: 84162 - protein, 5 aa, Artificial Sequence
  Building block peptide "PEP"
DMVVK

SEQ ID NO: 84163 - protein, 5 aa, Artificial Sequence
  Building block peptide "PEP"
DMVVR

SEQ ID NO: 84164 - protein, 5 aa, Artificial Sequence
  Building block peptide "PEP"
EMAVS

SEQ ID NO: 84165 - protein, 5 aa, Artificial Sequence
  Building block peptide "PEP"
EMEDH

SEQ ID NO: 84166 - protein, 5 aa, Artificial Sequence
  Building block peptide "PEP"
EMEEH

SEQ ID NO: 84167 - protein, 5 aa, Artificial Sequence
  Building block peptide "PEP"
EMEHS

SEQ ID NO: 84168 - protein, 5 aa, Artificial Sequence
  Building block peptide "PEP"
EMQHN

SEQ ID NO: 84169 - protein, 5 aa, Artificial Sequence
  Building block peptide "PEP"
EMTVE

SEQ ID NO: 84170 - protein, 5 aa, Artificial Sequence
  Building block peptide "PEP"
EMVAE

SEQ ID NO: 84171 - protein, 5 aa, Artificial Sequence
  Building block peptide "PEP"
EMVEE

SEQ ID NO: 84172 - protein, 5 aa, Artificial Sequence
  Building block peptide "PEP"
EMVKS

SEQ ID NO: 84173 - protein, 5 aa, Artificial Sequence
  Building block peptide "PEP"
EMVRS

SEQ ID NO: 84174 - protein, 5 aa, Artificial Sequence
  Building block peptide "PEP"
EMVVD

SEQ ID NO: 84175 - protein, 5 aa, Artificial Sequence
  Building block peptide "PEP"
EMVVE

SEQ ID NO: 84176 - protein, 5 aa, Artificial Sequence
  Building block peptide "PEP"
EMVVK

SEQ ID NO: 84177 - protein, 5 aa, Artificial Sequence
  Building block peptide "PEP"
EMVVR

SEQ ID NO: 84178 - protein, 5 aa, Artificial Sequence
  Building block peptide "PEP"
EQLSN

SEQ ID NO: 84179 - protein, 5 aa, Artificial Sequence
  Building block peptide "PEP"
  MOD_RES (2), (4): Xaa is C or S
EXGXR

SEQ ID NO: 84180 - protein, 5 aa, Artificial Sequence
  Building block peptide "PEP"
FLAVS

SEQ ID NO: 84181 - protein, 5 aa, Artificial Sequence
  Building block peptide "PEP"
FLEDH

SEQ ID NO: 84182 - protein, 5 aa, Artificial Sequence
  Building block peptide "PEP"
FLEEH

SEQ ID NO: 84183 - protein, 5 aa, Artificial Sequence
  Building block peptide "PEP"
FLEHS

SEQ ID NO: 84184 - protein, 5 aa, Artificial Sequence
  Building block peptide "PEP"
FLQHN

SEQ ID NO: 84185 - protein, 5 aa, Artificial Sequence
  Building block peptide "PEP"
FLTVE

SEQ ID NO: 84186 - protein, 5 aa, Artificial Sequence
  Building block peptide "PEP"
FLVAE

SEQ ID NO: 84187 - protein, 5 aa, Artificial Sequence
  Building block peptide "PEP"
FLVEE

SEQ ID NO: 84188 - protein, 5 aa, Artificial Sequence
  Building block peptide "PEP"
FLVKS

SEQ ID NO: 84189 - protein, 5 aa, Artificial Sequence
  Building block peptide "PEP"
FLVRS

SEQ ID NO: 84190 - protein, 5 aa, Artificial Sequence
  Building block peptide "PEP"
FLVVD

SEQ ID NO: 84191 - protein, 5 aa, Artificial Sequence
  Building block peptide "PEP"
FLVVE

SEQ ID NO: 84192 - protein, 5 aa, Artificial Sequence
  Building block peptide "PEP"
FLVVK

SEQ ID NO: 84193 - protein, 5 aa, Artificial Sequence
  Building block peptide "PEP"
FLVVR

SEQ ID NO: 84194 - protein, 5 aa, Artificial Sequence
  Building block peptide "PEP"
GMAVS

SEQ ID NO: 84195 - protein, 5 aa, Artificial Sequence
  Building block peptide "PEP"
GMEDH

SEQ ID NO: 84196 - protein, 5 aa, Artificial Sequence
  Building block peptide "PEP"
GMEEH

SEQ ID NO: 84197 - protein, 5 aa, Artificial Sequence
  Building block peptide "PEP"
GMEHS

SEQ ID NO: 84198 - protein, 5 aa, Artificial Sequence
  Building block peptide "PEP"
GMQHN

SEQ ID NO: 84199 - protein, 5 aa, Artificial Sequence
  Building block peptide "PEP"
GMTVE

SEQ ID NO: 84200 - protein, 5 aa, Artificial Sequence
  Building block peptide "PEP"
GMVAE

SEQ ID NO: 84201 - protein, 5 aa, Artificial Sequence
  Building block peptide "PEP"
GMVEE

SEQ ID NO: 84202 - protein, 5 aa, Artificial Sequence
  Building block peptide "PEP"
GMVKS

SEQ ID NO: 84203 - protein, 5 aa, Artificial Sequence
  Building block peptide "PEP"
GMVRS

SEQ ID NO: 84204 - protein, 5 aa, Artificial Sequence
  Building block peptide "PEP"
GMVVD

SEQ ID NO: 84205 - protein, 5 aa, Artificial Sequence
  Building block peptide "PEP"
GMVVE

SEQ ID NO: 84206 - protein, 5 aa, Artificial Sequence
  Building block peptide "PEP"
GMVVK

SEQ ID NO: 84207 - protein, 5 aa, Artificial Sequence
  Building block peptide "PEP"
GMVVR

SEQ ID NO: 84208 - protein, 5 aa, Artificial Sequence
  Building block peptide "PEP"
  MOD_RES (2), (4): Xaa is C or S
GXGXR

SEQ ID NO: 84209 - protein, 5 aa, Artificial Sequence
  Building block peptide "PEP"
IGEMS

SEQ ID NO: 84210 - protein, 5 aa, Artificial Sequence
  Building block peptide "PEP"
KEVQV

SEQ ID NO: 84211 - protein, 5 aa, Artificial Sequence
  Building block peptide "PEP"
KFKYE

SEQ ID NO: 84212 - protein, 5 aa, Artificial Sequence
  Building block peptide "PEP"
KKATV

SEQ ID NO: 84213 - protein, 5 aa, Artificial Sequence
  Building block peptide "PEP"
  MOD_RES (2), (4): Xaa is C or S
KXEXR

SEQ ID NO: 84214 - protein, 5 aa, Artificial Sequence
  Building block peptide "PEP"
LEAVS

SEQ ID NO: 84215 - protein, 5 aa, Artificial Sequence
  Building block peptide "PEP"
LEEDH

SEQ ID NO: 84216 - protein, 5 aa, Artificial Sequence
  Building block peptide "PEP"
LEEEH

SEQ ID NO: 84217 - protein, 5 aa, Artificial Sequence
  Building block peptide "PEP"
LEEHS

SEQ ID NO: 84218 - protein, 5 aa, Artificial Sequence
  Building block peptide "PEP"
LEQHN

SEQ ID NO: 84219 - protein, 5 aa, Artificial Sequence
  Building block peptide "PEP"
LETVE

SEQ ID NO: 84220 - protein, 5 aa, Artificial Sequence
  Building block peptide "PEP"
LEVAE

SEQ ID NO: 84221 - protein, 5 aa, Artificial Sequence
  Building block peptide "PEP"
LEVEE

SEQ ID NO: 84222 - protein, 5 aa, Artificial Sequence
  Building block peptide "PEP"
LEVKS

SEQ ID NO: 84223 - protein, 5 aa, Artificial Sequence
  Building block peptide "PEP"
LEVRS

SEQ ID NO: 84224 - protein, 5 aa, Artificial Sequence
  Building block peptide "PEP"
LEVVD

SEQ ID NO: 84225 - protein, 5 aa, Artificial Sequence
  Building block peptide "PEP"
LEVVE

SEQ ID NO: 84226 - protein, 5 aa, Artificial Sequence
  Building block peptide "PEP"
LEVVK

SEQ ID NO: 84227 - protein, 5 aa, Artificial Sequence
  Building block peptide "PEP"
LEVVR

SEQ ID NO: 84228 - protein, 5 aa, Artificial Sequence
  Building block peptide "PEP"
LGEMS

SEQ ID NO: 84229 - protein, 5 aa, Artificial Sequence
  Building block peptide "PEP"
LKKYR

SEQ ID NO: 84230 - protein, 5 aa, Artificial Sequence
  Building block peptide "PEP"
LKNYQ

SEQ ID NO: 84231 - protein, 5 aa, Artificial Sequence
  Building block peptide "PEP"
LKVYP

SEQ ID NO: 84232 - protein, 5 aa, Artificial Sequence
  Building block peptide "PEP"
LKYHY

SEQ ID NO: 84233 - protein, 5 aa, Artificial Sequence
  Building block peptide "PEP"
LRKHR

SEQ ID NO: 84234 - protein, 5 aa, Artificial Sequence
  Building block peptide "PEP"
MIAVS

SEQ ID NO: 84235 - protein, 5 aa, Artificial Sequence
  Building block peptide "PEP"
MIEDH

SEQ ID NO: 84236 - protein, 5 aa, Artificial Sequence
  Building block peptide "PEP"
MIEEH

SEQ ID NO: 84237 - protein, 5 aa, Artificial Sequence
  Building block peptide "PEP"
MIEHS

SEQ ID NO: 84238 - protein, 5 aa, Artificial Sequence
  Building block peptide "PEP"
MIQHN

SEQ ID NO: 84239 - protein, 5 aa, Artificial Sequence
  Building block peptide "PEP"
MITVE

SEQ ID NO: 84240 - protein, 5 aa, Artificial Sequence
  Building block peptide "PEP"
MIVAE

SEQ ID NO: 84241 - protein, 5 aa, Artificial Sequence
  Building block peptide "PEP"
MIVEE

SEQ ID NO: 84242 - protein, 5 aa, Artificial Sequence
  Building block peptide "PEP"
MIVKS

SEQ ID NO: 84243 - protein, 5 aa, Artificial Sequence
  Building block peptide "PEP"
MIVRS

SEQ ID NO: 84244 - protein, 5 aa, Artificial Sequence
  Building block peptide "PEP"
MIVVD

SEQ ID NO: 84245 - protein, 5 aa, Artificial Sequence
  Building block peptide "PEP"
MIVVE

SEQ ID NO: 84246 - protein, 5 aa, Artificial Sequence
  Building block peptide "PEP"
MIVVK

SEQ ID NO: 84247 - protein, 5 aa, Artificial Sequence
  Building block peptide "PEP"
MIVVR

SEQ ID NO: 84248 - protein, 5 aa, Artificial Sequence
  Building block peptide "PEP"
MVAVS

SEQ ID NO: 84249 - protein, 5 aa, Artificial Sequence
  Building block peptide "PEP"
MVEDH

SEQ ID NO: 84250 - protein, 5 aa, Artificial Sequence
  Building block peptide "PEP"
MVEEH

SEQ ID NO: 84251 - protein, 5 aa, Artificial Sequence
  Building block peptide "PEP"
MVEHS

SEQ ID NO: 84252 - protein, 5 aa, Artificial Sequence
  Building block peptide "PEP"
MVQHN

SEQ ID NO: 84253 - protein, 5 aa, Artificial Sequence
  Building block peptide "PEP"
MVTVE

SEQ ID NO: 84254 - protein, 5 aa, Artificial Sequence
  Building block peptide "PEP"
MVVAE

SEQ ID NO: 84255 - protein, 5 aa, Artificial Sequence
  Building block peptide "PEP"
MVVEE

SEQ ID NO: 84256 - protein, 5 aa, Artificial Sequence
  Building block peptide "PEP"
MVVKS

SEQ ID NO: 84257 - protein, 5 aa, Artificial Sequence
  Building block peptide "PEP"
MVVRS

SEQ ID NO: 84258 - protein, 5 aa, Artificial Sequence
  Building block peptide "PEP"
MVVVD

SEQ ID NO: 84259 - protein, 5 aa, Artificial Sequence
  Building block peptide "PEP"
MVVVE

SEQ ID NO: 84260 - protein, 5 aa, Artificial Sequence
  Building block peptide "PEP"
MVVVK

SEQ ID NO: 84261 - protein, 5 aa, Artificial Sequence
  Building block peptide "PEP"
MVVVR

SEQ ID NO: 84262 - protein, 5 aa, Artificial Sequence
  Building block peptide "PEP"
NMAVS

SEQ ID NO: 84263 - protein, 5 aa, Artificial Sequence
  Building block peptide "PEP"
NMEDH

SEQ ID NO: 84264 - protein, 5 aa, Artificial Sequence
  Building block peptide "PEP"
NMEEH

SEQ ID NO: 84265 - protein, 5 aa, Artificial Sequence
  Building block peptide "PEP"
NMEHS

SEQ ID NO: 84266 - protein, 5 aa, Artificial Sequence
  Building block peptide "PEP"
NMQHN

SEQ ID NO: 84267 - protein, 5 aa, Artificial Sequence
  Building block peptide "PEP"
NMTVE

SEQ ID NO: 84268 - protein, 5 aa, Artificial Sequence
  Building block peptide "PEP"
NMVAE

SEQ ID NO: 84269 - protein, 5 aa, Artificial Sequence
  Building block peptide "PEP"
NMVEE

SEQ ID NO: 84270 - protein, 5 aa, Artificial Sequence
  Building block peptide "PEP"
NMVKS

SEQ ID NO: 84271 - protein, 5 aa, Artificial Sequence
  Building block peptide "PEP"
NMVRS

SEQ ID NO: 84272 - protein, 5 aa, Artificial Sequence
  Building block peptide "PEP"
NMVVD

SEQ ID NO: 84273 - protein, 5 aa, Artificial Sequence
  Building block peptide "PEP"
NMVVE

SEQ ID NO: 84274 - protein, 5 aa, Artificial Sequence
  Building block peptide "PEP"
NMVVK

SEQ ID NO: 84275 - protein, 5 aa, Artificial Sequence
  Building block peptide "PEP"
NMVVR

SEQ ID NO: 84276 - protein, 5 aa, Artificial Sequence
  Building block peptide "PEP"
  MOD_RES (2), (4): Xaa is C or S
QXEXR

SEQ ID NO: 84277 - protein, 5 aa, Artificial Sequence
  Building block peptide "PEP"
RLAVS

SEQ ID NO: 84278 - protein, 5 aa, Artificial Sequence
  Building block peptide "PEP"
RLEDH

SEQ ID NO: 84279 - protein, 5 aa, Artificial Sequence
  Building block peptide "PEP"
RLEEH

SEQ ID NO: 84280 - protein, 5 aa, Artificial Sequence
  Building block peptide "PEP"
RLEHS

SEQ ID NO: 84281 - protein, 5 aa, Artificial Sequence
  Building block peptide "PEP"
RLQHN

SEQ ID NO: 84282 - protein, 5 aa, Artificial Sequence
  Building block peptide "PEP"
RLTVE

SEQ ID NO: 84283 - protein, 5 aa, Artificial Sequence
  Building block peptide "PEP"
RLVAE

SEQ ID NO: 84284 - protein, 5 aa, Artificial Sequence
  Building block peptide "PEP"
RLVEE

SEQ ID NO: 84285 - protein, 5 aa, Artificial Sequence
  Building block peptide "PEP"
RLVKS

SEQ ID NO: 84286 - protein, 5 aa, Artificial Sequence
  Building block peptide "PEP"
RLVRS

SEQ ID NO: 84287 - protein, 5 aa, Artificial Sequence
  Building block peptide "PEP"
RLVVD

SEQ ID NO: 84288 - protein, 5 aa, Artificial Sequence
  Building block peptide "PEP"
RLVVE

SEQ ID NO: 84289 - protein, 5 aa, Artificial Sequence
  Building block peptide "PEP"
RLVVK

SEQ ID NO: 84290 - protein, 5 aa, Artificial Sequence
  Building block peptide "PEP"
RLVVR

SEQ ID NO: 84291 - protein, 5 aa, Artificial Sequence
  Building block peptide "PEP"
  MOD_RES (2), (4): Xaa is C or S
RXGXS

SEQ ID NO: 84292 - protein, 5 aa, Artificial Sequence
  Building block peptide "PEP"
SRVAL

SEQ ID NO: 84293 - protein, 5 aa, Artificial Sequence
  Building block peptide "PEP"
SRVDL

SEQ ID NO: 84294 - protein, 5 aa, Artificial Sequence
  Building block peptide "PEP"
SRVEE

SEQ ID NO: 84295 - protein, 5 aa, Artificial Sequence
  Building block peptide "PEP"
SRVEL

SEQ ID NO: 84296 - protein, 5 aa, Artificial Sequence
  Building block peptide "PEP"
SRVGQ

SEQ ID NO: 84297 - protein, 5 aa, Artificial Sequence
  Building block peptide "PEP"
SRVHH

SEQ ID NO: 84298 - protein, 5 aa, Artificial Sequence
  Building block peptide "PEP"
SRVKL

SEQ ID NO: 84299 - protein, 5 aa, Artificial Sequence
  Building block peptide "PEP"
SRVKM

SEQ ID NO: 84300 - protein, 5 aa, Artificial Sequence
  Building block peptide "PEP"
SRVKT

SEQ ID NO: 84301 - protein, 5 aa, Artificial Sequence
  Building block peptide "PEP"
SRVQL

SEQ ID NO: 84302 - protein, 5 aa, Artificial Sequence
  Building block peptide "PEP"
SRVRL

SEQ ID NO: 84303 - protein, 5 aa, Artificial Sequence
  Building block peptide "PEP"
  MOD_RES (2), (4): Xaa is C or S
SXAXR

SEQ ID NO: 84304 - protein, 5 aa, Artificial Sequence
  Building block peptide "PEP"
  MOD_RES (2), (4): Xaa is C or S
SXGXH

SEQ ID NO: 84305 - protein, 5 aa, Artificial Sequence
  Building block peptide "PEP"
  MOD_RES (2), (4): Xaa is C or S
SXGXR

SEQ ID NO: 84306 - protein, 5 aa, Artificial Sequence
  Building block peptide "PEP"
TLAVS

SEQ ID NO: 84307 - protein, 5 aa, Artificial Sequence
  Building block peptide "PEP"
TLEDH

SEQ ID NO: 84308 - protein, 5 aa, Artificial Sequence
  Building block peptide "PEP"
TLEEH

SEQ ID NO: 84309 - protein, 5 aa, Artificial Sequence
  Building block peptide "PEP"
TLEHS

SEQ ID NO: 84310 - protein, 5 aa, Artificial Sequence
  Building block peptide "PEP"
TLQHN

SEQ ID NO: 84311 - protein, 5 aa, Artificial Sequence
  Building block peptide "PEP"
TLTVE

SEQ ID NO: 84312 - protein, 5 aa, Artificial Sequence
  Building block peptide "PEP"
TLVAE

SEQ ID NO: 84313 - protein, 5 aa, Artificial Sequence
  Building block peptide "PEP"
TLVEE

SEQ ID NO: 84314 - protein, 5 aa, Artificial Sequence
  Building block peptide "PEP"
TLVKS

SEQ ID NO: 84315 - protein, 5 aa, Artificial Sequence
  Building block peptide "PEP"
TLVRS

SEQ ID NO: 84316 - protein, 5 aa, Artificial Sequence
  Building block peptide "PEP"
TLVVD

SEQ ID NO: 84317 - protein, 5 aa, Artificial Sequence
  Building block peptide "PEP"
TLVVE

SEQ ID NO: 84318 - protein, 5 aa, Artificial Sequence
  Building block peptide "PEP"
TLVVK

SEQ ID NO: 84319 - protein, 5 aa, Artificial Sequence
  Building block peptide "PEP"
TLVVR

SEQ ID NO: 84320 - protein, 5 aa, Artificial Sequence
  Building block peptide "PEP"
TPTAL

SEQ ID NO: 84321 - protein, 5 aa, Artificial Sequence
  Building block peptide "PEP"
TPTDL

SEQ ID NO: 84322 - protein, 5 aa, Artificial Sequence
  Building block peptide "PEP"
TPTEE

SEQ ID NO: 84323 - protein, 5 aa, Artificial Sequence
  Building block peptide "PEP"
TPTEL

SEQ ID NO: 84324 - protein, 5 aa, Artificial Sequence
  Building block peptide "PEP"
TPTGQ

SEQ ID NO: 84325 - protein, 5 aa, Artificial Sequence
  Building block peptide "PEP"
TPTHH

SEQ ID NO: 84326 - protein, 5 aa, Artificial Sequence
  Building block peptide "PEP"
TPTKL

SEQ ID NO: 84327 - protein, 5 aa, Artificial Sequence
  Building block peptide "PEP"
TPTKM

SEQ ID NO: 84328 - protein, 5 aa, Artificial Sequence
  Building block peptide "PEP"
TPTKT

SEQ ID NO: 84329 - protein, 5 aa, Artificial Sequence
  Building block peptide "PEP"
TPTQL

SEQ ID NO: 84330 - protein, 5 aa, Artificial Sequence
  Building block peptide "PEP"
TPTRL

SEQ ID NO: 84331 - protein, 5 aa, Artificial Sequence
  Building block peptide "PEP"
TQVAL

SEQ ID NO: 84332 - protein, 5 aa, Artificial Sequence
  Building block peptide "PEP"
TQVDL

SEQ ID NO: 84333 - protein, 5 aa, Artificial Sequence
  Building block peptide "PEP"
TQVEE

SEQ ID NO: 84334 - protein, 5 aa, Artificial Sequence
  Building block peptide "PEP"
TQVEL

SEQ ID NO: 84335 - protein, 5 aa, Artificial Sequence
  Building block peptide "PEP"
TQVGQ

SEQ ID NO: 84336 - protein, 5 aa, Artificial Sequence
  Building block peptide "PEP"
TQVHH

SEQ ID NO: 84337 - protein, 5 aa, Artificial Sequence
  Building block peptide "PEP"
TQVKL

SEQ ID NO: 84338 - protein, 5 aa, Artificial Sequence
  Building block peptide "PEP"
TQVKM

SEQ ID NO: 84339 - protein, 5 aa, Artificial Sequence
  Building block peptide "PEP"
TQVKT

SEQ ID NO: 84340 - protein, 5 aa, Artificial Sequence
  Building block peptide "PEP"
TQVQL

SEQ ID NO: 84341 - protein, 5 aa, Artificial Sequence
  Building block peptide "PEP"
TQVRL

SEQ ID NO: 84342 - protein, 5 aa, Artificial Sequence
  Building block peptide "PEP"
VPAAL

SEQ ID NO: 84343 - protein, 5 aa, Artificial Sequence
  Building block peptide "PEP"
VPADL

SEQ ID NO: 84344 - protein, 5 aa, Artificial Sequence
  Building block peptide "PEP"
VPAEE

SEQ ID NO: 84345 - protein, 5 aa, Artificial Sequence
  Building block peptide "PEP"
VPAEL

SEQ ID NO: 84346 - protein, 5 aa, Artificial Sequence
  Building block peptide "PEP"
VPAGQ

SEQ ID NO: 84347 - protein, 5 aa, Artificial Sequence
  Building block peptide "PEP"
VPAHH

SEQ ID NO: 84348 - protein, 5 aa, Artificial Sequence
  Building block peptide "PEP"
VPAKL

SEQ ID NO: 84349 - protein, 5 aa, Artificial Sequence
  Building block peptide "PEP"
VPAKM

SEQ ID NO: 84350 - protein, 5 aa, Artificial Sequence
  Building block peptide "PEP"
VPAKT

SEQ ID NO: 84351 - protein, 5 aa, Artificial Sequence
  Building block peptide "PEP"
VPAQL

SEQ ID NO: 84352 - protein, 5 aa, Artificial Sequence
  Building block peptide "PEP"
VPARL

SEQ ID NO: 84353 - protein, 5 aa, Artificial Sequence
  Building block peptide "PEP"
VPEAL

SEQ ID NO: 84354 - protein, 5 aa, Artificial Sequence
  Building block peptide "PEP"
VPEDL

SEQ ID NO: 84355 - protein, 5 aa, Artificial Sequence
  Building block peptide "PEP"
VPEEE

SEQ ID NO: 84356 - protein, 5 aa, Artificial Sequence
  Building block peptide "PEP"
VPEEL

SEQ ID NO: 84357 - protein, 5 aa, Artificial Sequence
  Building block peptide "PEP"
VPEGQ

SEQ ID NO: 84358 - protein, 5 aa, Artificial Sequence
  Building block peptide "PEP"
VPEHH

SEQ ID NO: 84359 - protein, 5 aa, Artificial Sequence
  Building block peptide "PEP"
VPEKL

SEQ ID NO: 84360 - protein, 5 aa, Artificial Sequence
  Building block peptide "PEP"
VPEKM

SEQ ID NO: 84361 - protein, 5 aa, Artificial Sequence
  Building block peptide "PEP"
VPEKT

SEQ ID NO: 84362 - protein, 5 aa, Artificial Sequence
  Building block peptide "PEP"
VPEQL

SEQ ID NO: 84363 - protein, 5 aa, Artificial Sequence
  Building block peptide "PEP"
VPERL

SEQ ID NO: 84364 - protein, 5 aa, Artificial Sequence
  Building block peptide "PEP"
VPQAL

SEQ ID NO: 84365 - protein, 5 aa, Artificial Sequence
  Building block peptide "PEP"
VPQDL

SEQ ID NO: 84366 - protein, 5 aa, Artificial Sequence
  Building block peptide "PEP"
VPQEE

SEQ ID NO: 84367 - protein, 5 aa, Artificial Sequence
  Building block peptide "PEP"
VPQEL

SEQ ID NO: 84368 - protein, 5 aa, Artificial Sequence
  Building block peptide "PEP"
VPQGQ

SEQ ID NO: 84369 - protein, 5 aa, Artificial Sequence
  Building block peptide "PEP"
VPQHH

SEQ ID NO: 84370 - protein, 5 aa, Artificial Sequence
  Building block peptide "PEP"
VPQKL

SEQ ID NO: 84371 - protein, 5 aa, Artificial Sequence
  Building block peptide "PEP"
VPQKM

SEQ ID NO: 84372 - protein, 5 aa, Artificial Sequence
  Building block peptide "PEP"
VPQKT

SEQ ID NO: 84373 - protein, 5 aa, Artificial Sequence
  Building block peptide "PEP"
VPQQL

SEQ ID NO: 84374 - protein, 5 aa, Artificial Sequence
  Building block peptide "PEP"
VPQRL

SEQ ID NO: 84375 - protein, 5 aa, Artificial Sequence
  Building block peptide "PEP"
VPTAL

SEQ ID NO: 84376 - protein, 5 aa, Artificial Sequence
  Building block peptide "PEP"
VPTDL

SEQ ID NO: 84377 - protein, 5 aa, Artificial Sequence
  Building block peptide "PEP"
VPTEE

SEQ ID NO: 84378 - protein, 5 aa, Artificial Sequence
  Building block peptide "PEP"
VPTEL

SEQ ID NO: 84379 - protein, 5 aa, Artificial Sequence
  Building block peptide "PEP"
VPTGQ

SEQ ID NO: 84380 - protein, 5 aa, Artificial Sequence
  Building block peptide "PEP"
VPTHH

SEQ ID NO: 84381 - protein, 5 aa, Artificial Sequence
  Building block peptide "PEP"
VPTKL

SEQ ID NO: 84382 - protein, 5 aa, Artificial Sequence
  Building block peptide "PEP"
VPTKM

SEQ ID NO: 84383 - protein, 5 aa, Artificial Sequence
  Building block peptide "PEP"
VPTKT

SEQ ID NO: 84384 - protein, 5 aa, Artificial Sequence
  Building block peptide "PEP"
VPTQL

SEQ ID NO: 84385 - protein, 5 aa, Artificial Sequence
  Building block peptide "PEP"
VPTRL

SEQ ID NO: 84386 - protein, 5 aa, Artificial Sequence
  Building block peptide "PEP"
VSQAL

SEQ ID NO: 84387 - protein, 5 aa, Artificial Sequence
  Building block peptide "PEP"
VSQDL

SEQ ID NO: 84388 - protein, 5 aa, Artificial Sequence
  Building block peptide "PEP"
VSQEE

SEQ ID NO: 84389 - protein, 5 aa, Artificial Sequence
  Building block peptide "PEP"
VSQEL

SEQ ID NO: 84390 - protein, 5 aa, Artificial Sequence
  Building block peptide "PEP"
VSQGQ

SEQ ID NO: 84391 - protein, 5 aa, Artificial Sequence
  Building block peptide "PEP"
VSQHH

SEQ ID NO: 84392 - protein, 5 aa, Artificial Sequence
  Building block peptide "PEP"
VSQKL

SEQ ID NO: 84393 - protein, 5 aa, Artificial Sequence
  Building block peptide "PEP"
VSQKM

SEQ ID NO: 84394 - protein, 5 aa, Artificial Sequence
  Building block peptide "PEP"
VSQKT

SEQ ID NO: 84395 - protein, 5 aa, Artificial Sequence
  Building block peptide "PEP"
VSQQL

SEQ ID NO: 84396 - protein, 5 aa, Artificial Sequence
  Building block peptide "PEP"
VSQRL

SEQ ID NO: 84397 - protein, 5 aa, Artificial Sequence
  Building block peptide "PEP"
YGKIP

SEQ ID NO: 84398 - protein, 5 aa, Artificial Sequence
  Building block peptide "PEP"
YKQYE

SEQ ID NO: 84399 - protein, 6 aa, Artificial Sequence
  Building block peptide "PEP"
  MOD_RES (3), (5): Xaa is C or S
LAXKXE

SEQ ID NO: 84400 - protein, 6 aa, Artificial Sequence
  Building block peptide "PEP"
  MOD_RES (3), (5): Xaa is C or S
LEXAXA

SEQ ID NO: 84401 - protein, 7 aa, Artificial Sequence
  Building block peptide "PEP"
  MOD_RES (6), (7): Xaa is C or S
AAPASXX

SEQ ID NO: 84402 - protein, 7 aa, Artificial Sequence
  Building block peptide "PEP"
  MOD_RES (6), (7): Xaa is C or S
ASAAPXX

SEQ ID NO: 84403 - protein, 7 aa, Artificial Sequence
  Building block peptide "PEP"
  MOD_RES (6), (7): Xaa is C or S
ASASPXX

SEQ ID NO: 84404 - protein, 7 aa, Artificial Sequence
  Building block peptide "PEP"
  MOD_RES (6), (7): Xaa is C or S
AVPKAXX

SEQ ID NO: 84405 - protein, 7 aa, Artificial Sequence
  Building block peptide "PEP"
EGMSAVS

SEQ ID NO: 84406 - protein, 7 aa, Artificial Sequence
  Building block peptide "PEP"
EGMSEDH

SEQ ID NO: 84407 - protein, 7 aa, Artificial Sequence
  Building block peptide "PEP"
EGMSEEH

SEQ ID NO: 84408 - protein, 7 aa, Artificial Sequence
  Building block peptide "PEP"
EGMSEHS

SEQ ID NO: 84409 - protein, 7 aa, Artificial Sequence
  Building block peptide "PEP"
EGMSQHN

SEQ ID NO: 84410 - protein, 7 aa, Artificial Sequence
  Building block peptide "PEP"
EGMSTVE

SEQ ID NO: 84411 - protein, 7 aa, Artificial Sequence
  Building block peptide "PEP"
EGMSVAE

SEQ ID NO: 84412 - protein, 7 aa, Artificial Sequence
  Building block peptide "PEP"
EGMSVEE

SEQ ID NO: 84413 - protein, 7 aa, Artificial Sequence
  Building block peptide "PEP"
EGMSVKS

SEQ ID NO: 84414 - protein, 7 aa, Artificial Sequence
  Building block peptide "PEP"
EGMSVRS

SEQ ID NO: 84415 - protein, 7 aa, Artificial Sequence
  Building block peptide "PEP"
EGMSVVD

SEQ ID NO: 84416 - protein, 7 aa, Artificial Sequence
  Building block peptide "PEP"
EGMSVVE

SEQ ID NO: 84417 - protein, 7 aa, Artificial Sequence
  Building block peptide "PEP"
EGMSVVK

SEQ ID NO: 84418 - protein, 7 aa, Artificial Sequence
  Building block peptide "PEP"
EGMSVVR

SEQ ID NO: 84419 - protein, 7 aa, Artificial Sequence
  Building block peptide "PEP"
  MOD_RES (6), (7): Xaa is C or S
GIPEPXX

SEQ ID NO: 84420 - protein, 7 aa, Artificial Sequence
  Building block peptide "PEP"
  MOD_RES (6), (7): Xaa is C or S
GSAGPXX

SEQ ID NO: 84421 - protein, 7 aa, Artificial Sequence
  Building block peptide "PEP"
  MOD_RES (6), (7): Xaa is C or S
HVPKPXX

SEQ ID NO: 84422 - protein, 7 aa, Artificial Sequence
  Building block peptide "PEP"
  MOD_RES (7), (7): Xaa is C or S
HVTKPTX

SEQ ID NO: 84423 - protein, 7 aa, Artificial Sequence
  Building block peptide "PEP"
  MOD_RES (6), (7): Xaa is C or S
KASKAXX

SEQ ID NO: 84424 - protein, 7 aa, Artificial Sequence
  Building block peptide "PEP"
  MOD_RES (6), (7): Xaa is C or S
KIPKAXX

SEQ ID NO: 84425 - protein, 7 aa, Artificial Sequence
  Building block peptide "PEP"
  MOD_RES (6), (7): Xaa is C or S
KVGKAXX

SEQ ID NO: 84426 - protein, 7 aa, Artificial Sequence
  Building block peptide "PEP"
  MOD_RES (7), (7): Xaa is C or S
NDEGLEX

SEQ ID NO: 84427 - protein, 7 aa, Artificial Sequence
  Building block peptide "PEP"
  MOD_RES (5), (5): Xaa is C or S
RNVQXRP

SEQ ID NO: 84428 - protein, 7 aa, Artificial Sequence
  Building block peptide "PEP"
  MOD_RES (6), (7): Xaa is C or S
RVPSTXX

SEQ ID NO: 84429 - protein, 7 aa, Artificial Sequence
  Building block peptide "PEP"
  MOD_RES (6), (7): Xaa is C or S
SIPKAXX

SEQ ID NO: 84430 - protein, 7 aa, Artificial Sequence
  Building block peptide "PEP"
  MOD_RES (5), (5): Xaa is C or S
SSVKXQP

SEQ ID NO: 84431 - protein, 7 aa, Artificial Sequence
  Building block peptide "PEP"
  MOD_RES (6), (7): Xaa is C or S
STPPTXX

SEQ ID NO: 84432 - protein, 7 aa, Artificial Sequence
  Building block peptide "PEP"
  MOD_RES (6), (7): Xaa is C or S
TVPKPXX

SEQ ID NO: 84433 - protein, 7 aa, Artificial Sequence
  Building block peptide "PEP"
  MOD_RES (6), (7): Xaa is C or S
YVPKPXX

SEQ ID NO: 84434 - protein, 9 aa, Artificial Sequence
  Building block peptide "PEP"
  MOD_RES (6), (8): Xaa is C or S
MIAVSXGXL

SEQ ID NO: 84435 - protein, 9 aa, Artificial Sequence
  Building block peptide "PEP"
  MOD_RES (6), (8): Xaa is C or S
MIAVSXKXS

SEQ ID NO: 84436 - protein, 9 aa, Artificial Sequence
  Building block peptide "PEP"
  MOD_RES (6), (8): Xaa is C or S
MIEDHXGXL

SEQ ID NO: 84437 - protein, 9 aa, Artificial Sequence
  Building block peptide "PEP"
  MOD_RES (6), (8): Xaa is C or S
MIEDHXKXS

SEQ ID NO: 84438 - protein, 9 aa, Artificial Sequence
  Building block peptide "PEP"
  MOD_RES (6), (8): Xaa is C or S
MIEEHXGXL

SEQ ID NO: 84439 - protein, 9 aa, Artificial Sequence
  Building block peptide "PEP"
  MOD_RES (6), (8): Xaa is C or S
MIEEHXKXS

SEQ ID NO: 84440 - protein, 9 aa, Artificial Sequence
  Building block peptide "PEP"
  MOD_RES (6), (8): Xaa is C or S
MIEHSXGXL

SEQ ID NO: 84441 - protein, 9 aa, Artificial Sequence
  Building block peptide "PEP"
  MOD_RES (6), (8): Xaa is C or S
MIEHSXKXS

SEQ ID NO: 84442 - protein, 9 aa, Artificial Sequence
  Building block peptide "PEP"
  MOD_RES (6), (8): Xaa is C or S
MIQHNXGXL

SEQ ID NO: 84443 - protein, 9 aa, Artificial Sequence
  Building block peptide "PEP"
  MOD_RES (6), (8): Xaa is C or S
MIQHNXKXS

SEQ ID NO: 84444 - protein, 9 aa, Artificial Sequence
  Building block peptide "PEP"
  MOD_RES (6), (8): Xaa is C or S
MITVEXGXL

SEQ ID NO: 84445 - protein, 9 aa, Artificial Sequence
  Building block peptide "PEP"
  MOD_RES (6), (8): Xaa is C or S
MITVEXKXS

SEQ ID NO: 84446 - protein, 9 aa, Artificial Sequence
  Building block peptide "PEP"
  MOD_RES (6), (8): Xaa is C or S
MIVAEXGXL

SEQ ID NO: 84447 - protein, 9 aa, Artificial Sequence
  Building block peptide "PEP"
  MOD_RES (6), (8): Xaa is C or S
MIVAEXKXS

SEQ ID NO: 84448 - protein, 9 aa, Artificial Sequence
  Building block peptide "PEP"
  MOD_RES (6), (8): Xaa is C or S
MIVEEXGXL

SEQ ID NO: 84449 - protein, 9 aa, Artificial Sequence
  Building block peptide "PEP"
  MOD_RES (6), (8): Xaa is C or S
MIVEEXKXS

SEQ ID NO: 84450 - protein, 9 aa, Artificial Sequence
  Building block peptide "PEP"
  MOD_RES (6), (8): Xaa is C or S
MIVKSXGXL

SEQ ID NO: 84451 - protein, 9 aa, Artificial Sequence
  Building block peptide "PEP"
  MOD_RES (6), (8): Xaa is C or S
MIVKSXKXS

SEQ ID NO: 84452 - protein, 9 aa, Artificial Sequence
  Building block peptide "PEP"
  MOD_RES (6), (8): Xaa is C or S
MIVRSXGXL

SEQ ID NO: 84453 - protein, 9 aa, Artificial Sequence
  Building block peptide "PEP"
  MOD_RES (6), (8): Xaa is C or S
MIVRSXKXS

SEQ ID NO: 84454 - protein, 9 aa, Artificial Sequence
  Building block peptide "PEP"
  MOD_RES (6), (8): Xaa is C or S
MIVVDXGXL

SEQ ID NO: 84455 - protein, 9 aa, Artificial Sequence
  Building block peptide "PEP"
  MOD_RES (6), (8): Xaa is C or S
MIVVDXKXS

SEQ ID NO: 84456 - protein, 9 aa, Artificial Sequence
  Building block peptide "PEP"
  MOD_RES (6), (8): Xaa is C or S
MIVVEXGXL

SEQ ID NO: 84457 - protein, 9 aa, Artificial Sequence
  Building block peptide "PEP"
  MOD_RES (6), (8): Xaa is C or S
MIVVEXKXS

SEQ ID NO: 84458 - protein, 9 aa, Artificial Sequence
  Building block peptide "PEP"
  MOD_RES (6), (8): Xaa is C or S
MIVVKXGXL

SEQ ID NO: 84459 - protein, 9 aa, Artificial Sequence
  Building block peptide "PEP"
  MOD_RES (6), (8): Xaa is C or S
MIVVKXKXS

SEQ ID NO: 84460 - protein, 9 aa, Artificial Sequence
  Building block peptide "PEP"
  MOD_RES (6), (8): Xaa is C or S
MIVVRXGXL

SEQ ID NO: 84461 - protein, 9 aa, Artificial Sequence
  Building block peptide "PEP"
  MOD_RES (6), (8): Xaa is C or S
MIVVRXKXS

SEQ ID NO: 84462 - protein, 9 aa, Artificial Sequence
  Building block peptide "PEP"
  MOD_RES (6), (8): Xaa is C or S
MVAVSXKXS

SEQ ID NO: 84463 - protein, 9 aa, Artificial Sequence
  Building block peptide "PEP"
  MOD_RES (6), (8): Xaa is C or S
MVEDHXKXS

SEQ ID NO: 84464 - protein, 9 aa, Artificial Sequence
  Building block peptide "PEP"
  MOD_RES (6), (8): Xaa is C or S
MVEEHXKXS

SEQ ID NO: 84465 - protein, 9 aa, Artificial Sequence
  Building block peptide "PEP"
  MOD_RES (6), (8): Xaa is C or S
MVEHSXKXS

SEQ ID NO: 84466 - protein, 9 aa, Artificial Sequence
  Building block peptide "PEP"
  MOD_RES (6), (8): Xaa is C or S
MVQHNXKXS

SEQ ID NO: 84467 - protein, 9 aa, Artificial Sequence
  Building block peptide "PEP"
  MOD_RES (6), (8): Xaa is C or S
MVTVEXKXS

SEQ ID NO: 84468 - protein, 9 aa, Artificial Sequence
  Building block peptide "PEP"
  MOD_RES (6), (8): Xaa is C or S
MVVAEXKXS

SEQ ID NO: 84469 - protein, 9 aa, Artificial Sequence
  Building block peptide "PEP"
  MOD_RES (6), (8): Xaa is C or S
MVVEEXKXS

SEQ ID NO: 84470 - protein, 9 aa, Artificial Sequence
  Building block peptide "PEP"
  MOD_RES (6), (8): Xaa is C or S
MVVKSXKXS

SEQ ID NO: 84471 - protein, 9 aa, Artificial Sequence
  Building block peptide "PEP"
  MOD_RES (6), (8): Xaa is C or S
MVVRSXKXS

SEQ ID NO: 84472 - protein, 9 aa, Artificial Sequence
  Building block peptide "PEP"
  MOD_RES (6), (8): Xaa is C or S
MVVVDXKXS

SEQ ID NO: 84473 - protein, 9 aa, Artificial Sequence
  Building block peptide "PEP"
  MOD_RES (6), (8): Xaa is C or S
MVVVEXKXS

SEQ ID NO: 84474 - protein, 9 aa, Artificial Sequence
  Building block peptide "PEP"
  MOD_RES (6), (8): Xaa is C or S
MVVVKXKXS

SEQ ID NO: 84475 - protein, 9 aa, Artificial Sequence
  Building block peptide "PEP"
  MOD_RES (6), (8): Xaa is C or S
MVVVRXKXS

SEQ ID NO: 84476 - protein, 10 aa, Artificial Sequence
  Building block peptide "PEP"
  MOD_RES (7), (9): Xaa is C or S
DMAVSAXGXR

SEQ ID NO: 84477 - protein, 10 aa, Artificial Sequence
  Building block peptide "PEP"
  MOD_RES (7), (9): Xaa is C or S
DMAVSSXGXR

SEQ ID NO: 84478 - protein, 10 aa, Artificial Sequence
  Building block peptide "PEP"
  MOD_RES (5), (7): Xaa is C or S
DMAVXGXGSR

SEQ ID NO: 84479 - protein, 10 aa, Artificial Sequence
  Building block peptide "PEP"
  MOD_RES (7), (9): Xaa is C or S
DMEDHAXGXR

SEQ ID NO: 84480 - protein, 10 aa, Artificial Sequence
  Building block peptide "PEP"
  MOD_RES (7), (9): Xaa is C or S
DMEDHGXGXR

SEQ ID NO: 84481 - protein, 10 aa, Artificial Sequence
  Building block peptide "PEP"
  MOD_RES (7), (9): Xaa is C or S
DMEDHSXGXR

SEQ ID NO: 84482 - protein, 10 aa, Artificial Sequence
  Building block peptide "PEP"
  MOD_RES (7), (9): Xaa is C or S
DMEEHAXGXR

SEQ ID NO: 84483 - protein, 10 aa, Artificial Sequence
  Building block peptide "PEP"
  MOD_RES (7), (9): Xaa is C or S
DMEEHGXGXR

SEQ ID NO: 84484 - protein, 10 aa, Artificial Sequence
  Building block peptide "PEP"
  MOD_RES (7), (9): Xaa is C or S
DMEEHSXGXR

SEQ ID NO: 84485 - protein, 10 aa, Artificial Sequence
  Building block peptide "PEP"
  MOD_RES (7), (9): Xaa is C or S
DMEHSAXGXR

SEQ ID NO: 84486 - protein, 10 aa, Artificial Sequence
  Building block peptide "PEP"
  MOD_RES (7), (9): Xaa is C or S
DMEHSSXGXR

SEQ ID NO: 84487 - protein, 10 aa, Artificial Sequence
  Building block peptide "PEP"
  MOD_RES (5), (7): Xaa is C or S
DMEHXGXGSR

SEQ ID NO: 84488 - protein, 10 aa, Artificial Sequence
  Building block peptide "PEP"
  MOD_RES (7), (9): Xaa is C or S
DMQHNAXGXR

SEQ ID NO: 84489 - protein, 10 aa, Artificial Sequence
  Building block peptide "PEP"
  MOD_RES (7), (9): Xaa is C or S
DMQHNGXGXR

SEQ ID NO: 84490 - protein, 10 aa, Artificial Sequence
  Building block peptide "PEP"
  MOD_RES (7), (9): Xaa is C or S
DMQHNSXGXR

SEQ ID NO: 84491 - protein, 10 aa, Artificial Sequence
  Building block peptide "PEP"
  MOD_RES (7), (9): Xaa is C or S
DMTVEAXGXR

SEQ ID NO: 84492 - protein, 10 aa, Artificial Sequence
  Building block peptide "PEP"
  MOD_RES (7), (9): Xaa is C or S
DMTVEGXGXR

SEQ ID NO: 84493 - protein, 10 aa, Artificial Sequence
  Building block peptide "PEP"
  MOD_RES (7), (9): Xaa is C or S
DMTVESXGXR

SEQ ID NO: 84494 - protein, 10 aa, Artificial Sequence
  Building block peptide "PEP"
  MOD_RES (7), (9): Xaa is C or S
DMVAEAXGXR

SEQ ID NO: 84495 - protein, 10 aa, Artificial Sequence
  Building block peptide "PEP"
  MOD_RES (7), (9): Xaa is C or S
DMVAEGXGXR

SEQ ID NO: 84496 - protein, 10 aa, Artificial Sequence
  Building block peptide "PEP"
  MOD_RES (7), (9): Xaa is C or S
DMVAESXGXR

SEQ ID NO: 84497 - protein, 10 aa, Artificial Sequence
  Building block peptide "PEP"
  MOD_RES (7), (9): Xaa is C or S
DMVEEAXGXR

SEQ ID NO: 84498 - protein, 10 aa, Artificial Sequence
  Building block peptide "PEP"
  MOD_RES (7), (9): Xaa is C or S
DMVEEGXGXR

SEQ ID NO: 84499 - protein, 10 aa, Artificial Sequence
  Building block peptide "PEP"
  MOD_RES (7), (9): Xaa is C or S
DMVEESXGXR

SEQ ID NO: 84500 - protein, 10 aa, Artificial Sequence
  Building block peptide "PEP"
  MOD_RES (7), (9): Xaa is C or S
DMVKSAXGXR

SEQ ID NO: 84501 - protein, 10 aa, Artificial Sequence
  Building block peptide "PEP"
  MOD_RES (7), (9): Xaa is C or S
DMVKSSXGXR

SEQ ID NO: 84502 - protein, 10 aa, Artificial Sequence
  Building block peptide "PEP"
  MOD_RES (5), (7): Xaa is C or S
DMVKXGXGSR

SEQ ID NO: 84503 - protein, 10 aa, Artificial Sequence
  Building block peptide "PEP"
  MOD_RES (7), (9): Xaa is C or S
DMVRSAXGXR

SEQ ID NO: 84504 - protein, 10 aa, Artificial Sequence
  Building block peptide "PEP"
  MOD_RES (7), (9): Xaa is C or S
DMVRSSXGXR

SEQ ID NO: 84505 - protein, 10 aa, Artificial Sequence
  Building block peptide "PEP"
  MOD_RES (5), (7): Xaa is C or S
DMVRXGXGSR

SEQ ID NO: 84506 - protein, 10 aa, Artificial Sequence
  Building block peptide "PEP"
  MOD_RES (7), (9): Xaa is C or S
DMVVDAXGXR

SEQ ID NO: 84507 - protein, 10 aa, Artificial Sequence
  Building block peptide "PEP"
  MOD_RES (7), (9): Xaa is C or S
DMVVDGXGXR

SEQ ID NO: 84508 - protein, 10 aa, Artificial Sequence
  Building block peptide "PEP"
  MOD_RES (7), (9): Xaa is C or S
DMVVDSXGXR

SEQ ID NO: 84509 - protein, 10 aa, Artificial Sequence
  Building block peptide "PEP"
  MOD_RES (7), (9): Xaa is C or S
DMVVEAXGXR

SEQ ID NO: 84510 - protein, 10 aa, Artificial Sequence
  Building block peptide "PEP"
  MOD_RES (7), (9): Xaa is C or S
DMVVEGXGXR

SEQ ID NO: 84511 - protein, 10 aa, Artificial Sequence
  Building block peptide "PEP"
  MOD_RES (7), (9): Xaa is C or S
DMVVESXGXR

SEQ ID NO: 84512 - protein, 10 aa, Artificial Sequence
  Building block peptide "PEP"
  MOD_RES (7), (9): Xaa is C or S
DMVVKAXGXR

SEQ ID NO: 84513 - protein, 10 aa, Artificial Sequence
  Building block peptide "PEP"
  MOD_RES (7), (9): Xaa is C or S
DMVVKGXGXR

SEQ ID NO: 84514 - protein, 10 aa, Artificial Sequence
  Building block peptide "PEP"
  MOD_RES (7), (9): Xaa is C or S
DMVVKSXGXR

SEQ ID NO: 84515 - protein, 10 aa, Artificial Sequence
  Building block peptide "PEP"
  MOD_RES (7), (9): Xaa is C or S
DMVVRAXGXR

SEQ ID NO: 84516 - protein, 10 aa, Artificial Sequence
  Building block peptide "PEP"
  MOD_RES (7), (9): Xaa is C or S
DMVVRGXGXR

SEQ ID NO: 84517 - protein, 10 aa, Artificial Sequence
  Building block peptide "PEP"
  MOD_RES (7), (9): Xaa is C or S
DMVVRSXGXR

SEQ ID NO: 84518 - protein, 10 aa, Artificial Sequence
  Building block peptide "PEP"
  MOD_RES (5), (7): Xaa is C or S
EMAVXGXGSR

SEQ ID NO: 84519 - protein, 10 aa, Artificial Sequence
  Building block peptide "PEP"
  MOD_RES (7), (9): Xaa is C or S
EMEDHGXGXR

SEQ ID NO: 84520 - protein, 10 aa, Artificial Sequence
  Building block peptide "PEP"
  MOD_RES (7), (9): Xaa is C or S
EMEEHGXGXR

SEQ ID NO: 84521 - protein, 10 aa, Artificial Sequence
  Building block peptide "PEP"
  MOD_RES (5), (7): Xaa is C or S
EMEHXGXGSR

SEQ ID NO: 84522 - protein, 10 aa, Artificial Sequence
  Building block peptide "PEP"
  MOD_RES (7), (9): Xaa is C or S
EMQHNGXGXR

SEQ ID NO: 84523 - protein, 10 aa, Artificial Sequence
  Building block peptide "PEP"
  MOD_RES (7), (9): Xaa is C or S
EMTVEGXGXR

SEQ ID NO: 84524 - protein, 10 aa, Artificial Sequence
  Building block peptide "PEP"
  MOD_RES (7), (9): Xaa is C or S
EMVAEGXGXR

SEQ ID NO: 84525 - protein, 10 aa, Artificial Sequence
  Building block peptide "PEP"
  MOD_RES (7), (9): Xaa is C or S
EMVEEGXGXR

SEQ ID NO: 84526 - protein, 10 aa, Artificial Sequence
  Building block peptide "PEP"
  MOD_RES (5), (7): Xaa is C or S
EMVKXGXGSR

SEQ ID NO: 84527 - protein, 10 aa, Artificial Sequence
  Building block peptide "PEP"
  MOD_RES (5), (7): Xaa is C or S
EMVRXGXGSR

SEQ ID NO: 84528 - protein, 10 aa, Artificial Sequence
  Building block peptide "PEP"
  MOD_RES (7), (9): Xaa is C or S
EMVVDGXGXR

SEQ ID NO: 84529 - protein, 10 aa, Artificial Sequence
  Building block peptide "PEP"
  MOD_RES (7), (9): Xaa is C or S
EMVVEGXGXR

SEQ ID NO: 84530 - protein, 10 aa, Artificial Sequence
  Building block peptide "PEP"
  MOD_RES (7), (9): Xaa is C or S
EMVVKGXGXR

SEQ ID NO: 84531 - protein, 10 aa, Artificial Sequence
  Building block peptide "PEP"
  MOD_RES (7), (9): Xaa is C or S
EMVVRGXGXR

SEQ ID NO: 84532 - protein, 10 aa, Artificial Sequence
  Building block peptide "PEP"
  MOD_RES (5), (7): Xaa is C or S
FLAVXKXESR

SEQ ID NO: 84533 - protein, 10 aa, Artificial Sequence
  Building block peptide "PEP"
  MOD_RES (7), (9): Xaa is C or S
FLEDHKXEXR

SEQ ID NO: 84534 - protein, 10 aa, Artificial Sequence
  Building block peptide "PEP"
  MOD_RES (7), (9): Xaa is C or S
FLEEHKXEXR

SEQ ID NO: 84535 - protein, 10 aa, Artificial Sequence
  Building block peptide "PEP"
  MOD_RES (5), (7): Xaa is C or S
FLEHXKXESR

SEQ ID NO: 84536 - protein, 10 aa, Artificial Sequence
  Building block peptide "PEP"
  MOD_RES (7), (9): Xaa is C or S
FLQHNKXEXR

SEQ ID NO: 84537 - protein, 10 aa, Artificial Sequence
  Building block peptide "PEP"
  MOD_RES (7), (9): Xaa is C or S
FLTVEKXEXR

SEQ ID NO: 84538 - protein, 10 aa, Artificial Sequence
  Building block peptide "PEP"
  MOD_RES (7), (9): Xaa is C or S
FLVAEKXEXR

SEQ ID NO: 84539 - protein, 10 aa, Artificial Sequence
  Building block peptide "PEP"
  MOD_RES (7), (9): Xaa is C or S
FLVEEKXEXR

SEQ ID NO: 84540 - protein, 10 aa, Artificial Sequence
  Building block peptide "PEP"
  MOD_RES (5), (7): Xaa is C or S
FLVKXKXESR

SEQ ID NO: 84541 - protein, 10 aa, Artificial Sequence
  Building block peptide "PEP"
  MOD_RES (5), (7): Xaa is C or S
FLVRXKXESR

SEQ ID NO: 84542 - protein, 10 aa, Artificial Sequence
  Building block peptide "PEP"
  MOD_RES (7), (9): Xaa is C or S
FLVVDKXEXR

SEQ ID NO: 84543 - protein, 10 aa, Artificial Sequence
  Building block peptide "PEP"
  MOD_RES (7), (9): Xaa is C or S
FLVVEKXEXR

SEQ ID NO: 84544 - protein, 10 aa, Artificial Sequence
  Building block peptide "PEP"
  MOD_RES (7), (9): Xaa is C or S
FLVVKKXEXR

SEQ ID NO: 84545 - protein, 10 aa, Artificial Sequence
  Building block peptide "PEP"
  MOD_RES (7), (9): Xaa is C or S
FLVVRKXEXR

SEQ ID NO: 84546 - protein, 10 aa, Artificial Sequence
  Building block peptide "PEP"
  MOD_RES (7), (9): Xaa is C or S
GMAVSEXGXR

SEQ ID NO: 84547 - protein, 10 aa, Artificial Sequence
  Building block peptide "PEP"
  MOD_RES (7), (9): Xaa is C or S
GMAVSRXGXS

SEQ ID NO: 84548 - protein, 10 aa, Artificial Sequence
  Building block peptide "PEP"
  MOD_RES (7), (9): Xaa is C or S
GMEDHEXGXR

SEQ ID NO: 84549 - protein, 10 aa, Artificial Sequence
  Building block peptide "PEP"
  MOD_RES (7), (9): Xaa is C or S
GMEDHRXGXS

SEQ ID NO: 84550 - protein, 10 aa, Artificial Sequence
  Building block peptide "PEP"
  MOD_RES (7), (9): Xaa is C or S
GMEEHEXGXR

SEQ ID NO: 84551 - protein, 10 aa, Artificial Sequence
  Building block peptide "PEP"
  MOD_RES (7), (9): Xaa is C or S
GMEEHRXGXS

SEQ ID NO: 84552 - protein, 10 aa, Artificial Sequence
  Building block peptide "PEP"
  MOD_RES (7), (9): Xaa is C or S
GMEHSEXGXR

SEQ ID NO: 84553 - protein, 10 aa, Artificial Sequence
  Building block peptide "PEP"
  MOD_RES (7), (9): Xaa is C or S
GMEHSRXGXS

SEQ ID NO: 84554 - protein, 10 aa, Artificial Sequence
  Building block peptide "PEP"
  MOD_RES (7), (9): Xaa is C or S
GMQHNEXGXR

SEQ ID NO: 84555 - protein, 10 aa, Artificial Sequence
  Building block peptide "PEP"
  MOD_RES (7), (9): Xaa is C or S
GMQHNRXGXS

SEQ ID NO: 84556 - protein, 10 aa, Artificial Sequence
  Building block peptide "PEP"
  MOD_RES (7), (9): Xaa is C or S
GMTVEEXGXR

SEQ ID NO: 84557 - protein, 10 aa, Artificial Sequence
  Building block peptide "PEP"
  MOD_RES (7), (9): Xaa is C or S
GMTVERXGXS

SEQ ID NO: 84558 - protein, 10 aa, Artificial Sequence
  Building block peptide "PEP"
  MOD_RES (7), (9): Xaa is C or S
GMVAEEXGXR

SEQ ID NO: 84559 - protein, 10 aa, Artificial Sequence
  Building block peptide "PEP"
  MOD_RES (7), (9): Xaa is C or S
GMVAERXGXS

SEQ ID NO: 84560 - protein, 10 aa, Artificial Sequence
  Building block peptide "PEP"
  MOD_RES (7), (9): Xaa is C or S
GMVEEEXGXR

SEQ ID NO: 84561 - protein, 10 aa, Artificial Sequence
  Building block peptide "PEP"
  MOD_RES (7), (9): Xaa is C or S
GMVEERXGXS

SEQ ID NO: 84562 - protein, 10 aa, Artificial Sequence
  Building block peptide "PEP"
  MOD_RES (7), (9): Xaa is C or S
GMVKSEXGXR

SEQ ID NO: 84563 - protein, 10 aa, Artificial Sequence
  Building block peptide "PEP"
  MOD_RES (7), (9): Xaa is C or S
GMVKSRXGXS

SEQ ID NO: 84564 - protein, 10 aa, Artificial Sequence
  Building block peptide "PEP"
  MOD_RES (7), (9): Xaa is C or S
GMVRSEXGXR

SEQ ID NO: 84565 - protein, 10 aa, Artificial Sequence
  Building block peptide "PEP"
  MOD_RES (7), (9): Xaa is C or S
GMVRSRXGXS

SEQ ID NO: 84566 - protein, 10 aa, Artificial Sequence
  Building block peptide "PEP"
  MOD_RES (7), (9): Xaa is C or S
GMVVDEXGXR

SEQ ID NO: 84567 - protein, 10 aa, Artificial Sequence
  Building block peptide "PEP"
  MOD_RES (7), (9): Xaa is C or S
GMVVDRXGXS

SEQ ID NO: 84568 - protein, 10 aa, Artificial Sequence
  Building block peptide "PEP"
  MOD_RES (7), (9): Xaa is C or S
GMVVEEXGXR

SEQ ID NO: 84569 - protein, 10 aa, Artificial Sequence
  Building block peptide "PEP"
  MOD_RES (7), (9): Xaa is C or S
GMVVERXGXS

SEQ ID NO: 84570 - protein, 10 aa, Artificial Sequence
  Building block peptide "PEP"
  MOD_RES (7), (9): Xaa is C or S
GMVVKEXGXR

SEQ ID NO: 84571 - protein, 10 aa, Artificial Sequence
  Building block peptide "PEP"
  MOD_RES (7), (9): Xaa is C or S
GMVVKRXGXS

SEQ ID NO: 84572 - protein, 10 aa, Artificial Sequence
  Building block peptide "PEP"
  MOD_RES (7), (9): Xaa is C or S
GMVVREXGXR

SEQ ID NO: 84573 - protein, 10 aa, Artificial Sequence
  Building block peptide "PEP"
  MOD_RES (7), (9): Xaa is C or S
GMVVRRXGXS

SEQ ID NO: 84574 - protein, 10 aa, Artificial Sequence
  Building block peptide "PEP"
  MOD_RES (7), (9): Xaa is C or S
LEAVSQXEXR

SEQ ID NO: 84575 - protein, 10 aa, Artificial Sequence
  Building block peptide "PEP"
  MOD_RES (7), (9): Xaa is C or S
LEEDHQXEXR

SEQ ID NO: 84576 - protein, 10 aa, Artificial Sequence
  Building block peptide "PEP"
  MOD_RES (7), (9): Xaa is C or S
LEEEHQXEXR

SEQ ID NO: 84577 - protein, 10 aa, Artificial Sequence
  Building block peptide "PEP"
  MOD_RES (7), (9): Xaa is C or S
LEEHSQXEXR

SEQ ID NO: 84578 - protein, 10 aa, Artificial Sequence
  Building block peptide "PEP"
  MOD_RES (7), (9): Xaa is C or S
LEQHNQXEXR

SEQ ID NO: 84579 - protein, 10 aa, Artificial Sequence
  Building block peptide "PEP"
  MOD_RES (7), (9): Xaa is C or S
LETVEQXEXR

SEQ ID NO: 84580 - protein, 10 aa, Artificial Sequence
  Building block peptide "PEP"
  MOD_RES (7), (9): Xaa is C or S
LEVAEQXEXR

SEQ ID NO: 84581 - protein, 10 aa, Artificial Sequence
  Building block peptide "PEP"
  MOD_RES (7), (9): Xaa is C or S
LEVEEQXEXR

SEQ ID NO: 84582 - protein, 10 aa, Artificial Sequence
  Building block peptide "PEP"
  MOD_RES (7), (9): Xaa is C or S
LEVKSQXEXR

SEQ ID NO: 84583 - protein, 10 aa, Artificial Sequence
  Building block peptide "PEP"
  MOD_RES (7), (9): Xaa is C or S
LEVRSQXEXR

SEQ ID NO: 84584 - protein, 10 aa, Artificial Sequence
  Building block peptide "PEP"
  MOD_RES (7), (9): Xaa is C or S
LEVVDQXEXR

SEQ ID NO: 84585 - protein, 10 aa, Artificial Sequence
  Building block peptide "PEP"
  MOD_RES (7), (9): Xaa is C or S
LEVVEQXEXR

SEQ ID NO: 84586 - protein, 10 aa, Artificial Sequence
  Building block peptide "PEP"
  MOD_RES (7), (9): Xaa is C or S
LEVVKQXEXR

SEQ ID NO: 84587 - protein, 10 aa, Artificial Sequence
  Building block peptide "PEP"
  MOD_RES (7), (9): Xaa is C or S
LEVVRQXEXR

SEQ ID NO: 84588 - protein, 10 aa, Artificial Sequence
  Building block peptide "PEP"
  MOD_RES (7), (9): Xaa is C or S
NMAVSAXGXH

SEQ ID NO: 84589 - protein, 10 aa, Artificial Sequence
  Building block peptide "PEP"
  MOD_RES (7), (9): Xaa is C or S
NMAVSSXAXR

SEQ ID NO: 84590 - protein, 10 aa, Artificial Sequence
  Building block peptide "PEP"
  MOD_RES (7), (9): Xaa is C or S
NMAVSSXGXH

SEQ ID NO: 84591 - protein, 10 aa, Artificial Sequence
  Building block peptide "PEP"
  MOD_RES (7), (9): Xaa is C or S
NMEDHAXGXH

SEQ ID NO: 84592 - protein, 10 aa, Artificial Sequence
  Building block peptide "PEP"
  MOD_RES (7), (9): Xaa is C or S
NMEDHSXAXR

SEQ ID NO: 84593 - protein, 10 aa, Artificial Sequence
  Building block peptide "PEP"
  MOD_RES (7), (9): Xaa is C or S
NMEDHSXGXH

SEQ ID NO: 84594 - protein, 10 aa, Artificial Sequence
  Building block peptide "PEP"
  MOD_RES (7), (9): Xaa is C or S
NMEEHAXGXH

SEQ ID NO: 84595 - protein, 10 aa, Artificial Sequence
  Building block peptide "PEP"
  MOD_RES (7), (9): Xaa is C or S
NMEEHSXAXR

SEQ ID NO: 84596 - protein, 10 aa, Artificial Sequence
  Building block peptide "PEP"
  MOD_RES (7), (9): Xaa is C or S
NMEEHSXGXH

SEQ ID NO: 84597 - protein, 10 aa, Artificial Sequence
  Building block peptide "PEP"
  MOD_RES (7), (9): Xaa is C or S
NMEHSAXGXH

SEQ ID NO: 84598 - protein, 10 aa, Artificial Sequence
  Building block peptide "PEP"
  MOD_RES (7), (9): Xaa is C or S
NMEHSSXAXR

SEQ ID NO: 84599 - protein, 10 aa, Artificial Sequence
  Building block peptide "PEP"
  MOD_RES (7), (9): Xaa is C or S
NMEHSSXGXH

SEQ ID NO: 84600 - protein, 10 aa, Artificial Sequence
  Building block peptide "PEP"
  MOD_RES (7), (9): Xaa is C or S
NMQHNAXGXH

SEQ ID NO: 84601 - protein, 10 aa, Artificial Sequence
  Building block peptide "PEP"
  MOD_RES (7), (9): Xaa is C or S
NMQHNSXAXR

SEQ ID NO: 84602 - protein, 10 aa, Artificial Sequence
  Building block peptide "PEP"
  MOD_RES (7), (9): Xaa is C or S
NMQHNSXGXH

SEQ ID NO: 84603 - protein, 10 aa, Artificial Sequence
  Building block peptide "PEP"
  MOD_RES (7), (9): Xaa is C or S
NMTVEAXGXH

SEQ ID NO: 84604 - protein, 10 aa, Artificial Sequence
  Building block peptide "PEP"
  MOD_RES (7), (9): Xaa is C or S
NMTVESXAXR

SEQ ID NO: 84605 - protein, 10 aa, Artificial Sequence
  Building block peptide "PEP"
  MOD_RES (7), (9): Xaa is C or S
NMTVESXGXH

SEQ ID NO: 84606 - protein, 10 aa, Artificial Sequence
  Building block peptide "PEP"
  MOD_RES (7), (9): Xaa is C or S
NMVAEAXGXH

SEQ ID NO: 84607 - protein, 10 aa, Artificial Sequence
  Building block peptide "PEP"
  MOD_RES (7), (9): Xaa is C or S
NMVAESXAXR

SEQ ID NO: 84608 - protein, 10 aa, Artificial Sequence
  Building block peptide "PEP"
  MOD_RES (7), (9): Xaa is C or S
NMVAESXGXH

SEQ ID NO: 84609 - protein, 10 aa, Artificial Sequence
  Building block peptide "PEP"
  MOD_RES (7), (9): Xaa is C or S
NMVEEAXGXH

SEQ ID NO: 84610 - protein, 10 aa, Artificial Sequence
  Building block peptide "PEP"
  MOD_RES (7), (9): Xaa is C or S
NMVEESXAXR

SEQ ID NO: 84611 - protein, 10 aa, Artificial Sequence
  Building block peptide "PEP"
  MOD_RES (7), (9): Xaa is C or S
NMVEESXGXH

SEQ ID NO: 84612 - protein, 10 aa, Artificial Sequence
  Building block peptide "PEP"
  MOD_RES (7), (9): Xaa is C or S
NMVKSAXGXH

SEQ ID NO: 84613 - protein, 10 aa, Artificial Sequence
  Building block peptide "PEP"
  MOD_RES (7), (9): Xaa is C or S
NMVKSSXAXR

SEQ ID NO: 84614 - protein, 10 aa, Artificial Sequence
  Building block peptide "PEP"
  MOD_RES (7), (9): Xaa is C or S
NMVKSSXGXH

SEQ ID NO: 84615 - protein, 10 aa, Artificial Sequence
  Building block peptide "PEP"
  MOD_RES (7), (9): Xaa is C or S
NMVRSAXGXH

SEQ ID NO: 84616 - protein, 10 aa, Artificial Sequence
  Building block peptide "PEP"
  MOD_RES (7), (9): Xaa is C or S
NMVRSSXAXR

SEQ ID NO: 84617 - protein, 10 aa, Artificial Sequence
  Building block peptide "PEP"
  MOD_RES (7), (9): Xaa is C or S
NMVRSSXGXH

SEQ ID NO: 84618 - protein, 10 aa, Artificial Sequence
  Building block peptide "PEP"
  MOD_RES (7), (9): Xaa is C or S
NMVVDAXGXH

SEQ ID NO: 84619 - protein, 10 aa, Artificial Sequence
  Building block peptide "PEP"
  MOD_RES (7), (9): Xaa is C or S
NMVVDSXAXR

SEQ ID NO: 84620 - protein, 10 aa, Artificial Sequence
  Building block peptide "PEP"
  MOD_RES (7), (9): Xaa is C or S
NMVVDSXGXH

SEQ ID NO: 84621 - protein, 10 aa, Artificial Sequence
  Building block peptide "PEP"
  MOD_RES (7), (9): Xaa is C or S
NMVVEAXGXH

SEQ ID NO: 84622 - protein, 10 aa, Artificial Sequence
  Building block peptide "PEP"
  MOD_RES (7), (9): Xaa is C or S
NMVVESXAXR

SEQ ID NO: 84623 - protein, 10 aa, Artificial Sequence
  Building block peptide "PEP"
  MOD_RES (7), (9): Xaa is C or S
NMVVESXGXH

SEQ ID NO: 84624 - protein, 10 aa, Artificial Sequence
  Building block peptide "PEP"
  MOD_RES (7), (9): Xaa is C or S
NMVVKAXGXH

SEQ ID NO: 84625 - protein, 10 aa, Artificial Sequence
  Building block peptide "PEP"
  MOD_RES (7), (9): Xaa is C or S
NMVVKSXAXR

SEQ ID NO: 84626 - protein, 10 aa, Artificial Sequence
  Building block peptide "PEP"
  MOD_RES (7), (9): Xaa is C or S
NMVVKSXGXH

SEQ ID NO: 84627 - protein, 10 aa, Artificial Sequence
  Building block peptide "PEP"
  MOD_RES (7), (9): Xaa is C or S
NMVVRAXGXH

SEQ ID NO: 84628 - protein, 10 aa, Artificial Sequence
  Building block peptide "PEP"
  MOD_RES (7), (9): Xaa is C or S
NMVVRSXAXR

SEQ ID NO: 84629 - protein, 10 aa, Artificial Sequence
  Building block peptide "PEP"
  MOD_RES (7), (9): Xaa is C or S
NMVVRSXGXH

SEQ ID NO: 84630 - protein, 11 aa, Artificial Sequence
  Building block peptide "PEP"
  MOD_RES (8), (10): Xaa is C or S
EGMSAVSXGXR

SEQ ID NO: 84631 - protein, 11 aa, Artificial Sequence
  Building block peptide "PEP"
  MOD_RES (8), (10): Xaa is C or S
EGMSEDHXGXR

SEQ ID NO: 84632 - protein, 11 aa, Artificial Sequence
  Building block peptide "PEP"
  MOD_RES (8), (10): Xaa is C or S
EGMSEEHXGXR

SEQ ID NO: 84633 - protein, 11 aa, Artificial Sequence
  Building block peptide "PEP"
  MOD_RES (8), (10): Xaa is C or S
EGMSEHSXGXR

SEQ ID NO: 84634 - protein, 11 aa, Artificial Sequence
  Building block peptide "PEP"
  MOD_RES (8), (10): Xaa is C or S
EGMSQHNXGXR

SEQ ID NO: 84635 - protein, 11 aa, Artificial Sequence
  Building block peptide "PEP"
  MOD_RES (8), (10): Xaa is C or S
EGMSTVEXGXR

SEQ ID NO: 84636 - protein, 11 aa, Artificial Sequence
  Building block peptide "PEP"
  MOD_RES (8), (10): Xaa is C or S
EGMSVAEXGXR

SEQ ID NO: 84637 - protein, 11 aa, Artificial Sequence
  Building block peptide "PEP"
  MOD_RES (8), (10): Xaa is C or S
EGMSVEEXGXR

SEQ ID NO: 84638 - protein, 11 aa, Artificial Sequence
  Building block peptide "PEP"
  MOD_RES (8), (10): Xaa is C or S
EGMSVKSXGXR

SEQ ID NO: 84639 - protein, 11 aa, Artificial Sequence
  Building block peptide "PEP"
  MOD_RES (8), (10): Xaa is C or S
EGMSVRSXGXR

SEQ ID NO: 84640 - protein, 11 aa, Artificial Sequence
  Building block peptide "PEP"
  MOD_RES (8), (10): Xaa is C or S
EGMSVVDXGXR

SEQ ID NO: 84641 - protein, 11 aa, Artificial Sequence
  Building block peptide "PEP"
  MOD_RES (8), (10): Xaa is C or S
EGMSVVEXGXR

SEQ ID NO: 84642 - protein, 11 aa, Artificial Sequence
  Building block peptide "PEP"
  MOD_RES (8), (10): Xaa is C or S
EGMSVVKXGXR

SEQ ID NO: 84643 - protein, 11 aa, Artificial Sequence
  Building block peptide "PEP"
  MOD_RES (8), (10): Xaa is C or S
EGMSVVRXGXR

SEQ ID NO: 84644 - protein, 11 aa, Artificial Sequence
  Building block peptide "PEP"
  MOD_RES (8), (10): Xaa is C or S
RLAVSLEXAXA

SEQ ID NO: 84645 - protein, 11 aa, Artificial Sequence
  Building block peptide "PEP"
  MOD_RES (8), (10): Xaa is C or S
RLEDHLEXAXA

SEQ ID NO: 84646 - protein, 11 aa, Artificial Sequence
  Building block peptide "PEP"
  MOD_RES (8), (10): Xaa is C or S
RLEEHLEXAXA

SEQ ID NO: 84647 - protein, 11 aa, Artificial Sequence
  Building block peptide "PEP"
  MOD_RES (8), (10): Xaa is C or S
RLEHSLEXAXA

SEQ ID NO: 84648 - protein, 11 aa, Artificial Sequence
  Building block peptide "PEP"
  MOD_RES (8), (10): Xaa is C or S
RLQHNLEXAXA

SEQ ID NO: 84649 - protein, 11 aa, Artificial Sequence
  Building block peptide "PEP"
  MOD_RES (8), (10): Xaa is C or S
RLTVELEXAXA

SEQ ID NO: 84650 - protein, 11 aa, Artificial Sequence
  Building block peptide "PEP"
  MOD_RES (8), (10): Xaa is C or S
RLVAELEXAXA

SEQ ID NO: 84651 - protein, 11 aa, Artificial Sequence
  Building block peptide "PEP"
  MOD_RES (8), (10): Xaa is C or S
RLVEELEXAXA

SEQ ID NO: 84652 - protein, 11 aa, Artificial Sequence
  Building block peptide "PEP"
  MOD_RES (8), (10): Xaa is C or S
RLVKSLEXAXA

SEQ ID NO: 84653 - protein, 11 aa, Artificial Sequence
  Building block peptide "PEP"
  MOD_RES (8), (10): Xaa is C or S
RLVRSLEXAXA

SEQ ID NO: 84654 - protein, 11 aa, Artificial Sequence
  Building block peptide "PEP"
  MOD_RES (8), (10): Xaa is C or S
RLVVDLEXAXA

SEQ ID NO: 84655 - protein, 11 aa, Artificial Sequence
  Building block peptide "PEP"
  MOD_RES (8), (10): Xaa is C or S
RLVVELEXAXA

SEQ ID NO: 84656 - protein, 11 aa, Artificial Sequence
  Building block peptide "PEP"
  MOD_RES (8), (10): Xaa is C or S
RLVVKLEXAXA

SEQ ID NO: 84657 - protein, 11 aa, Artificial Sequence
  Building block peptide "PEP"
  MOD_RES (8), (10): Xaa is C or S
RLVVRLEXAXA

SEQ ID NO: 84658 - protein, 11 aa, Artificial Sequence
  Building block peptide "PEP"
  MOD_RES (8), (10): Xaa is C or S
TLAVSLAXKXE

SEQ ID NO: 84659 - protein, 11 aa, Artificial Sequence
  Building block peptide "PEP"
  MOD_RES (8), (10): Xaa is C or S
TLEDHLAXKXE

SEQ ID NO: 84660 - protein, 11 aa, Artificial Sequence
  Building block peptide "PEP"
  MOD_RES (8), (10): Xaa is C or S
TLEEHLAXKXE

SEQ ID NO: 84661 - protein, 11 aa, Artificial Sequence
  Building block peptide "PEP"
  MOD_RES (8), (10): Xaa is C or S
TLEHSLAXKXE

SEQ ID NO: 84662 - protein, 11 aa, Artificial Sequence
  Building block peptide "PEP"
  MOD_RES (8), (10): Xaa is C or S
TLQHNLAXKXE

SEQ ID NO: 84663 - protein, 11 aa, Artificial Sequence
  Building block peptide "PEP"
  MOD_RES (8), (10): Xaa is C or S
TLTVELAXKXE

SEQ ID NO: 84664 - protein, 11 aa, Artificial Sequence
  Building block peptide "PEP"
  MOD_RES (8), (10): Xaa is C or S
TLVAELAXKXE

SEQ ID NO: 84665 - protein, 11 aa, Artificial Sequence
  Building block peptide "PEP"
  MOD_RES (8), (10): Xaa is C or S
TLVEELAXKXE

SEQ ID NO: 84666 - protein, 11 aa, Artificial Sequence
  Building block peptide "PEP"
  MOD_RES (8), (10): Xaa is C or S
TLVKSLAXKXE

SEQ ID NO: 84667 - protein, 11 aa, Artificial Sequence
  Building block peptide "PEP"
  MOD_RES (8), (10): Xaa is C or S
TLVRSLAXKXE

SEQ ID NO: 84668 - protein, 11 aa, Artificial Sequence
  Building block peptide "PEP"
  MOD_RES (8), (10): Xaa is C or S
TLVVDLAXKXE

SEQ ID NO: 84669 - protein, 11 aa, Artificial Sequence
  Building block peptide "PEP"
  MOD_RES (8), (10): Xaa is C or S
TLVVELAXKXE

SEQ ID NO: 84670 - protein, 11 aa, Artificial Sequence
  Building block peptide "PEP"
  MOD_RES (8), (10): Xaa is C or S
TLVVKLAXKXE

SEQ ID NO: 84671 - protein, 11 aa, Artificial Sequence
  Building block peptide "PEP"
  MOD_RES (8), (10): Xaa is C or S
TLVVRLAXKXE

SEQ ID NO: 84672 - protein, 12 aa, Artificial Sequence
  Building block peptide "PEP"
AAPASSSSRVRL

SEQ ID NO: 84673 - protein, 12 aa, Artificial Sequence
  Building block peptide "PEP"
AAPASSSTQVRL

SEQ ID NO: 84674 - protein, 12 aa, Artificial Sequence
  Building block peptide "PEP"
  MOD_RES (6), (7): Xaa is C or S
AAPASXXAPTRL

SEQ ID NO: 84675 - protein, 12 aa, Artificial Sequence
  Building block peptide "PEP"
  MOD_RES (6), (7): Xaa is C or S
AAPASXXAPVRL

SEQ ID NO: 84676 - protein, 12 aa, Artificial Sequence
  Building block peptide "PEP"
  MOD_RES (6), (7): Xaa is C or S
AAPASXXTPTRL

SEQ ID NO: 84677 - protein, 12 aa, Artificial Sequence
  Building block peptide "PEP"
  MOD_RES (6), (7): Xaa is C or S
AAPASXXVPARL

SEQ ID NO: 84678 - protein, 12 aa, Artificial Sequence
  Building block peptide "PEP"
  MOD_RES (6), (7): Xaa is C or S
AAPASXXVPERL

SEQ ID NO: 84679 - protein, 12 aa, Artificial Sequence
  Building block peptide "PEP"
  MOD_RES (6), (7): Xaa is C or S
AAPASXXVPQRL

SEQ ID NO: 84680 - protein, 12 aa, Artificial Sequence
  Building block peptide "PEP"
  MOD_RES (6), (7): Xaa is C or S
AAPASXXVPTRL

SEQ ID NO: 84681 - protein, 12 aa, Artificial Sequence
  Building block peptide "PEP"
  MOD_RES (6), (7): Xaa is C or S
AAPASXXVSQRL

SEQ ID NO: 84682 - protein, 12 aa, Artificial Sequence
  Building block peptide "PEP"
ASAAPSSSRVAL

SEQ ID NO: 84683 - protein, 12 aa, Artificial Sequence
  Building block peptide "PEP"
ASAAPSSTQVAL

SEQ ID NO: 84684 - protein, 12 aa, Artificial Sequence
  Building block peptide "PEP"
  MOD_RES (6), (7): Xaa is C or S
ASAAPXXAPTAL

SEQ ID NO: 84685 - protein, 12 aa, Artificial Sequence
  Building block peptide "PEP"
  MOD_RES (6), (7): Xaa is C or S
ASAAPXXAPVAL

SEQ ID NO: 84686 - protein, 12 aa, Artificial Sequence
  Building block peptide "PEP"
  MOD_RES (6), (7): Xaa is C or S
ASAAPXXTPTAL

SEQ ID NO: 84687 - protein, 12 aa, Artificial Sequence
  Building block peptide "PEP"
  MOD_RES (6), (7): Xaa is C or S
ASAAPXXVPAAL

SEQ ID NO: 84688 - protein, 12 aa, Artificial Sequence
  Building block peptide "PEP"
  MOD_RES (6), (7): Xaa is C or S
ASAAPXXVPEAL

SEQ ID NO: 84689 - protein, 12 aa, Artificial Sequence
  Building block peptide "PEP"
  MOD_RES (6), (7): Xaa is C or S
ASAAPXXVPQAL

SEQ ID NO: 84690 - protein, 12 aa, Artificial Sequence
  Building block peptide "PEP"
  MOD_RES (6), (7): Xaa is C or S
ASAAPXXVPTAL

SEQ ID NO: 84691 - protein, 12 aa, Artificial Sequence
  Building block peptide "PEP"
  MOD_RES (6), (7): Xaa is C or S
ASAAPXXVSQAL

SEQ ID NO: 84692 - protein, 12 aa, Artificial Sequence
  Building block peptide "PEP"
ASASPSSSRVDL

SEQ ID NO: 84693 - protein, 12 aa, Artificial Sequence
  Building block peptide "PEP"
ASASPSSTQVDL

SEQ ID NO: 84694 - protein, 12 aa, Artificial Sequence
  Building block peptide "PEP"
  MOD_RES (6), (7): Xaa is C or S
ASASPXXAPTDL

SEQ ID NO: 84695 - protein, 12 aa, Artificial Sequence
  Building block peptide "PEP"
  MOD_RES (6), (7): Xaa is C or S
ASASPXXAPVDL

SEQ ID NO: 84696 - protein, 12 aa, Artificial Sequence
  Building block peptide "PEP"
  MOD_RES (6), (7): Xaa is C or S
ASASPXXTPTDL

SEQ ID NO: 84697 - protein, 12 aa, Artificial Sequence
  Building block peptide "PEP"
  MOD_RES (6), (7): Xaa is C or S
ASASPXXVPADL

SEQ ID NO: 84698 - protein, 12 aa, Artificial Sequence
  Building block peptide "PEP"
  MOD_RES (6), (7): Xaa is C or S
ASASPXXVPEDL

SEQ ID NO: 84699 - protein, 12 aa, Artificial Sequence
  Building block peptide "PEP"
  MOD_RES (6), (7): Xaa is C or S
ASASPXXVPQDL

SEQ ID NO: 84700 - protein, 12 aa, Artificial Sequence
  Building block peptide "PEP"
  MOD_RES (6), (7): Xaa is C or S
ASASPXXVPTDL

SEQ ID NO: 84701 - protein, 12 aa, Artificial Sequence
  Building block peptide "PEP"
  MOD_RES (6), (7): Xaa is C or S
ASASPXXVSQDL

SEQ ID NO: 84702 - protein, 12 aa, Artificial Sequence
  Building block peptide "PEP"
AVPKASSSRVKL

SEQ ID NO: 84703 - protein, 12 aa, Artificial Sequence
  Building block peptide "PEP"
AVPKASSTQVKL

SEQ ID NO: 84704 - protein, 12 aa, Artificial Sequence
  Building block peptide "PEP"
  MOD_RES (6), (7): Xaa is C or S
AVPKAXXAPTKL

SEQ ID NO: 84705 - protein, 12 aa, Artificial Sequence
  Building block peptide "PEP"
  MOD_RES (6), (7): Xaa is C or S
AVPKAXXAPVKL

SEQ ID NO: 84706 - protein, 12 aa, Artificial Sequence
  Building block peptide "PEP"
  MOD_RES (6), (7): Xaa is C or S
AVPKAXXTPTKL

SEQ ID NO: 84707 - protein, 12 aa, Artificial Sequence
  Building block peptide "PEP"
  MOD_RES (6), (7): Xaa is C or S
AVPKAXXVPAKL

SEQ ID NO: 84708 - protein, 12 aa, Artificial Sequence
  Building block peptide "PEP"
  MOD_RES (6), (7): Xaa is C or S
AVPKAXXVPEKL

SEQ ID NO: 84709 - protein, 12 aa, Artificial Sequence
  Building block peptide "PEP"
  MOD_RES (6), (7): Xaa is C or S
AVPKAXXVPQKL

SEQ ID NO: 84710 - protein, 12 aa, Artificial Sequence
  Building block peptide "PEP"
  MOD_RES (6), (7): Xaa is C or S
AVPKAXXVPTKL

SEQ ID NO: 84711 - protein, 12 aa, Artificial Sequence
  Building block peptide "PEP"
  MOD_RES (6), (7): Xaa is C or S
AVPKAXXVSQKL

SEQ ID NO: 84712 - protein, 12 aa, Artificial Sequence
  Building block peptide "PEP"
GIPEPSSSRVKM

SEQ ID NO: 84713 - protein, 12 aa, Artificial Sequence
  Building block peptide "PEP"
GIPEPSSTQVKM

SEQ ID NO: 84714 - protein, 12 aa, Artificial Sequence
  Building block peptide "PEP"
  MOD_RES (6), (7): Xaa is C or S
GIPEPXXAPTKM

SEQ ID NO: 84715 - protein, 12 aa, Artificial Sequence
  Building block peptide "PEP"
  MOD_RES (6), (7): Xaa is C or S
GIPEPXXAPVKM

SEQ ID NO: 84716 - protein, 12 aa, Artificial Sequence
  Building block peptide "PEP"
  MOD_RES (6), (7): Xaa is C or S
GIPEPXXTPTKM

SEQ ID NO: 84717 - protein, 12 aa, Artificial Sequence
  Building block peptide "PEP"
  MOD_RES (6), (7): Xaa is C or S
GIPEPXXVPAKM

SEQ ID NO: 84718 - protein, 12 aa, Artificial Sequence
  Building block peptide "PEP"
  MOD_RES (6), (7): Xaa is C or S
GIPEPXXVPEKM

SEQ ID NO: 84719 - protein, 12 aa, Artificial Sequence
  Building block peptide "PEP"
  MOD_RES (6), (7): Xaa is C or S
GIPEPXXVPQKM

SEQ ID NO: 84720 - protein, 12 aa, Artificial Sequence
  Building block peptide "PEP"
  MOD_RES (6), (7): Xaa is C or S
GIPEPXXVPTKM

SEQ ID NO: 84721 - protein, 12 aa, Artificial Sequence
  Building block peptide "PEP"
  MOD_RES (6), (7): Xaa is C or S
GIPEPXXVSQKM

SEQ ID NO: 84722 - protein, 12 aa, Artificial Sequence
  Building block peptide "PEP"
GSAGPSSSRVKM

SEQ ID NO: 84723 - protein, 12 aa, Artificial Sequence
  Building block peptide "PEP"
GSAGPSSTQVKM

SEQ ID NO: 84724 - protein, 12 aa, Artificial Sequence
  Building block peptide "PEP"
  MOD_RES (6), (7): Xaa is C or S
GSAGPXXAPTKM

SEQ ID NO: 84725 - protein, 12 aa, Artificial Sequence
  Building block peptide "PEP"
  MOD_RES (6), (7): Xaa is C or S
GSAGPXXAPVKM

SEQ ID NO: 84726 - protein, 12 aa, Artificial Sequence
  Building block peptide "PEP"
  MOD_RES (6), (7): Xaa is C or S
GSAGPXXTPTKM

SEQ ID NO: 84727 - protein, 12 aa, Artificial Sequence
  Building block peptide "PEP"
  MOD_RES (6), (7): Xaa is C or S
GSAGPXXVPAKM

SEQ ID NO: 84728 - protein, 12 aa, Artificial Sequence
  Building block peptide "PEP"
  MOD_RES (6), (7): Xaa is C or S
GSAGPXXVPEKM

SEQ ID NO: 84729 - protein, 12 aa, Artificial Sequence
  Building block peptide "PEP"
  MOD_RES (6), (7): Xaa is C or S
GSAGPXXVPQKM

SEQ ID NO: 84730 - protein, 12 aa, Artificial Sequence
  Building block peptide "PEP"
  MOD_RES (6), (7): Xaa is C or S
GSAGPXXVPTKM

SEQ ID NO: 84731 - protein, 12 aa, Artificial Sequence
  Building block peptide "PEP"
  MOD_RES (6), (7): Xaa is C or S
GSAGPXXVSQKM

SEQ ID NO: 84732 - protein, 12 aa, Artificial Sequence
  Building block peptide "PEP"
HVPKPSSSRVKL

SEQ ID NO: 84733 - protein, 12 aa, Artificial Sequence
  Building block peptide "PEP"
HVPKPSSTQVKL

SEQ ID NO: 84734 - protein, 12 aa, Artificial Sequence
  Building block peptide "PEP"
  MOD_RES (6), (7): Xaa is C or S
HVPKPXXAPTKL

SEQ ID NO: 84735 - protein, 12 aa, Artificial Sequence
  Building block peptide "PEP"
  MOD_RES (6), (7): Xaa is C or S
HVPKPXXAPVKL

SEQ ID NO: 84736 - protein, 12 aa, Artificial Sequence
  Building block peptide "PEP"
  MOD_RES (6), (7): Xaa is C or S
HVPKPXXTPTKL

SEQ ID NO: 84737 - protein, 12 aa, Artificial Sequence
  Building block peptide "PEP"
  MOD_RES (6), (7): Xaa is C or S
HVPKPXXVPAKL

SEQ ID NO: 84738 - protein, 12 aa, Artificial Sequence
  Building block peptide "PEP"
  MOD_RES (6), (7): Xaa is C or S
HVPKPXXVPEKL

SEQ ID NO: 84739 - protein, 12 aa, Artificial Sequence
  Building block peptide "PEP"
  MOD_RES (6), (7): Xaa is C or S
HVPKPXXVPQKL

SEQ ID NO: 84740 - protein, 12 aa, Artificial Sequence
  Building block peptide "PEP"
  MOD_RES (6), (7): Xaa is C or S
HVPKPXXVPTKL

SEQ ID NO: 84741 - protein, 12 aa, Artificial Sequence
  Building block peptide "PEP"
  MOD_RES (6), (7): Xaa is C or S
HVPKPXXVSQKL

SEQ ID NO: 84742 - protein, 12 aa, Artificial Sequence
  Building block peptide "PEP"
  MOD_RES (7), (7): Xaa is C or S
HVTKPTXAPTKL

SEQ ID NO: 84743 - protein, 12 aa, Artificial Sequence
  Building block peptide "PEP"
  MOD_RES (7), (7): Xaa is C or S
HVTKPTXAPVKL

SEQ ID NO: 84744 - protein, 12 aa, Artificial Sequence
  Building block peptide "PEP"
  MOD_RES (7), (7): Xaa is C or S
HVTKPTXSRVKL

SEQ ID NO: 84745 - protein, 12 aa, Artificial Sequence
  Building block peptide "PEP"
  MOD_RES (7), (7): Xaa is C or S
HVTKPTXTPTKL

SEQ ID NO: 84746 - protein, 12 aa, Artificial Sequence
  Building block peptide "PEP"
  MOD_RES (7), (7): Xaa is C or S
HVTKPTXTQVKL

SEQ ID NO: 84747 - protein, 12 aa, Artificial Sequence
  Building block peptide "PEP"
  MOD_RES (7), (7): Xaa is C or S
HVTKPTXVPAKL

SEQ ID NO: 84748 - protein, 12 aa, Artificial Sequence
  Building block peptide "PEP"
  MOD_RES (7), (7): Xaa is C or S
HVTKPTXVPEKL

SEQ ID NO: 84749 - protein, 12 aa, Artificial Sequence
  Building block peptide "PEP"
  MOD_RES (7), (7): Xaa is C or S
HVTKPTXVPQKL

SEQ ID NO: 84750 - protein, 12 aa, Artificial Sequence
  Building block peptide "PEP"
  MOD_RES (7), (7): Xaa is C or S
HVTKPTXVPTKL

SEQ ID NO: 84751 - protein, 12 aa, Artificial Sequence
  Building block peptide "PEP"
  MOD_RES (7), (7): Xaa is C or S
HVTKPTXVSQKL

SEQ ID NO: 84752 - protein, 12 aa, Artificial Sequence
  Building block peptide "PEP"
KASKASSSRVKL

SEQ ID NO: 84753 - protein, 12 aa, Artificial Sequence
  Building block peptide "PEP"
KASKASSTQVKL

SEQ ID NO: 84754 - protein, 12 aa, Artificial Sequence
  Building block peptide "PEP"
  MOD_RES (6), (7): Xaa is C or S
KASKAXXAPTKL

SEQ ID NO: 84755 - protein, 12 aa, Artificial Sequence
  Building block peptide "PEP"
  MOD_RES (6), (7): Xaa is C or S
KASKAXXAPVKL

SEQ ID NO: 84756 - protein, 12 aa, Artificial Sequence
  Building block peptide "PEP"
  MOD_RES (6), (7): Xaa is C or S
KASKAXXTPTKL

SEQ ID NO: 84757 - protein, 12 aa, Artificial Sequence
  Building block peptide "PEP"
  MOD_RES (6), (7): Xaa is C or S
KASKAXXVPAKL

SEQ ID NO: 84758 - protein, 12 aa, Artificial Sequence
  Building block peptide "PEP"
  MOD_RES (6), (7): Xaa is C or S
KASKAXXVPEKL

SEQ ID NO: 84759 - protein, 12 aa, Artificial Sequence
  Building block peptide "PEP"
  MOD_RES (6), (7): Xaa is C or S
KASKAXXVPQKL

SEQ ID NO: 84760 - protein, 12 aa, Artificial Sequence
  Building block peptide "PEP"
  MOD_RES (6), (7): Xaa is C or S
KASKAXXVPTKL

SEQ ID NO: 84761 - protein, 12 aa, Artificial Sequence
  Building block peptide "PEP"
  MOD_RES (6), (7): Xaa is C or S
KASKAXXVSQKL

SEQ ID NO: 84762 - protein, 12 aa, Artificial Sequence
  Building block peptide "PEP"
KIPKASSSRVEL

SEQ ID NO: 84763 - protein, 12 aa, Artificial Sequence
  Building block peptide "PEP"
KIPKASSTQVEL

SEQ ID NO: 84764 - protein, 12 aa, Artificial Sequence
  Building block peptide "PEP"
  MOD_RES (6), (7): Xaa is C or S
KIPKAXXAPTEL

SEQ ID NO: 84765 - protein, 12 aa, Artificial Sequence
  Building block peptide "PEP"
  MOD_RES (6), (7): Xaa is C or S
KIPKAXXAPVEL

SEQ ID NO: 84766 - protein, 12 aa, Artificial Sequence
  Building block peptide "PEP"
  MOD_RES (6), (7): Xaa is C or S
KIPKAXXTPTEL

SEQ ID NO: 84767 - protein, 12 aa, Artificial Sequence
  Building block peptide "PEP"
  MOD_RES (6), (7): Xaa is C or S
KIPKAXXVPAEL

SEQ ID NO: 84768 - protein, 12 aa, Artificial Sequence
  Building block peptide "PEP"
  MOD_RES (6), (7): Xaa is C or S
KIPKAXXVPEEL

SEQ ID NO: 84769 - protein, 12 aa, Artificial Sequence
  Building block peptide "PEP"
  MOD_RES (6), (7): Xaa is C or S
KIPKAXXVPQEL

SEQ ID NO: 84770 - protein, 12 aa, Artificial Sequence
  Building block peptide "PEP"
  MOD_RES (6), (7): Xaa is C or S
KIPKAXXVPTEL

SEQ ID NO: 84771 - protein, 12 aa, Artificial Sequence
  Building block peptide "PEP"
  MOD_RES (6), (7): Xaa is C or S
KIPKAXXVSQEL

SEQ ID NO: 84772 - protein, 12 aa, Artificial Sequence
  Building block peptide "PEP"
KVGKASSSRVKL

SEQ ID NO: 84773 - protein, 12 aa, Artificial Sequence
  Building block peptide "PEP"
KVGKASSTQVKL

SEQ ID NO: 84774 - protein, 12 aa, Artificial Sequence
  Building block peptide "PEP"
  MOD_RES (6), (7): Xaa is C or S
KVGKAXXAPTKL

SEQ ID NO: 84775 - protein, 12 aa, Artificial Sequence
  Building block peptide "PEP"
  MOD_RES (6), (7): Xaa is C or S
KVGKAXXAPVKL

SEQ ID NO: 84776 - protein, 12 aa, Artificial Sequence
  Building block peptide "PEP"
  MOD_RES (6), (7): Xaa is C or S
KVGKAXXTPTKL

SEQ ID NO: 84777 - protein, 12 aa, Artificial Sequence
  Building block peptide "PEP"
  MOD_RES (6), (7): Xaa is C or S
KVGKAXXVPAKL

SEQ ID NO: 84778 - protein, 12 aa, Artificial Sequence
  Building block peptide "PEP"
  MOD_RES (6), (7): Xaa is C or S
KVGKAXXVPEKL

SEQ ID NO: 84779 - protein, 12 aa, Artificial Sequence
  Building block peptide "PEP"
  MOD_RES (6), (7): Xaa is C or S
KVGKAXXVPQKL

SEQ ID NO: 84780 - protein, 12 aa, Artificial Sequence
  Building block peptide "PEP"
  MOD_RES (6), (7): Xaa is C or S
KVGKAXXVPTKL

SEQ ID NO: 84781 - protein, 12 aa, Artificial Sequence
  Building block peptide "PEP"
  MOD_RES (6), (7): Xaa is C or S
KVGKAXXVSQKL

SEQ ID NO: 84782 - protein, 12 aa, Artificial Sequence
  Building block peptide "PEP"
NDEGLESAPTEE

SEQ ID NO: 84783 - protein, 12 aa, Artificial Sequence
  Building block peptide "PEP"
NDEGLESAPTGQ

SEQ ID NO: 84784 - protein, 12 aa, Artificial Sequence
  Building block peptide "PEP"
NDEGLESAPVEE

SEQ ID NO: 84785 - protein, 12 aa, Artificial Sequence
  Building block peptide "PEP"
NDEGLESAPVGQ

SEQ ID NO: 84786 - protein, 12 aa, Artificial Sequence
  Building block peptide "PEP"
NDEGLESSRVEE

SEQ ID NO: 84787 - protein, 12 aa, Artificial Sequence
  Building block peptide "PEP"
NDEGLESSRVGQ

SEQ ID NO: 84788 - protein, 12 aa, Artificial Sequence
  Building block peptide "PEP"
NDEGLESTPTEE

SEQ ID NO: 84789 - protein, 12 aa, Artificial Sequence
  Building block peptide "PEP"
NDEGLESTPTGQ

SEQ ID NO: 84790 - protein, 12 aa, Artificial Sequence
  Building block peptide "PEP"
NDEGLESTQVEE

SEQ ID NO: 84791 - protein, 12 aa, Artificial Sequence
  Building block peptide "PEP"
NDEGLESTQVGQ

SEQ ID NO: 84792 - protein, 12 aa, Artificial Sequence
  Building block peptide "PEP"
  MOD_RES (7), (7): Xaa is C or S
NDEGLEXVPAEE

SEQ ID NO: 84793 - protein, 12 aa, Artificial Sequence
  Building block peptide "PEP"
  MOD_RES (7), (7): Xaa is C or S
NDEGLEXVPAGQ

SEQ ID NO: 84794 - protein, 12 aa, Artificial Sequence
  Building block peptide "PEP"
  MOD_RES (7), (7): Xaa is C or S
NDEGLEXVPEEE

SEQ ID NO: 84795 - protein, 12 aa, Artificial Sequence
  Building block peptide "PEP"
  MOD_RES (7), (7): Xaa is C or S
NDEGLEXVPEGQ

SEQ ID NO: 84796 - protein, 12 aa, Artificial Sequence
  Building block peptide "PEP"
  MOD_RES (7), (7): Xaa is C or S
NDEGLEXVPQEE

SEQ ID NO: 84797 - protein, 12 aa, Artificial Sequence
  Building block peptide "PEP"
  MOD_RES (7), (7): Xaa is C or S
NDEGLEXVPQGQ

SEQ ID NO: 84798 - protein, 12 aa, Artificial Sequence
  Building block peptide "PEP"
  MOD_RES (7), (7): Xaa is C or S
NDEGLEXVPTEE

SEQ ID NO: 84799 - protein, 12 aa, Artificial Sequence
  Building block peptide "PEP"
  MOD_RES (7), (7): Xaa is C or S
NDEGLEXVPTGQ

SEQ ID NO: 84800 - protein, 12 aa, Artificial Sequence
  Building block peptide "PEP"
  MOD_RES (7), (7): Xaa is C or S
NDEGLEXVSQEE

SEQ ID NO: 84801 - protein, 12 aa, Artificial Sequence
  Building block peptide "PEP"
  MOD_RES (7), (7): Xaa is C or S
NDEGLEXVSQGQ

SEQ ID NO: 84802 - protein, 12 aa, Artificial Sequence
  Building block peptide "PEP"
  MOD_RES (5), (5): Xaa is C or S
RNVQXRPAPTQL

SEQ ID NO: 84803 - protein, 12 aa, Artificial Sequence
  Building block peptide "PEP"
  MOD_RES (5), (5): Xaa is C or S
RNVQXRPAPVQL

SEQ ID NO: 84804 - protein, 12 aa, Artificial Sequence
  Building block peptide "PEP"
  MOD_RES (5), (5): Xaa is C or S
RNVQXRPSRVQL

SEQ ID NO: 84805 - protein, 12 aa, Artificial Sequence
  Building block peptide "PEP"
  MOD_RES (5), (5): Xaa is C or S
RNVQXRPTPTQL

SEQ ID NO: 84806 - protein, 12 aa, Artificial Sequence
  Building block peptide "PEP"
  MOD_RES (5), (5): Xaa is C or S
RNVQXRPTQVQL

SEQ ID NO: 84807 - protein, 12 aa, Artificial Sequence
  Building block peptide "PEP"
  MOD_RES (5), (5): Xaa is C or S
RNVQXRPVPAQL

SEQ ID NO: 84808 - protein, 12 aa, Artificial Sequence
  Building block peptide "PEP"
  MOD_RES (5), (5): Xaa is C or S
RNVQXRPVPEQL

SEQ ID NO: 84809 - protein, 12 aa, Artificial Sequence
  Building block peptide "PEP"
  MOD_RES (5), (5): Xaa is C or S
RNVQXRPVPQQL

SEQ ID NO: 84810 - protein, 12 aa, Artificial Sequence
  Building block peptide "PEP"
  MOD_RES (5), (5): Xaa is C or S
RNVQXRPVPTQL

SEQ ID NO: 84811 - protein, 12 aa, Artificial Sequence
  Building block peptide "PEP"
  MOD_RES (5), (5): Xaa is C or S
RNVQXRPVSQQL

SEQ ID NO: 84812 - protein, 12 aa, Artificial Sequence
  Building block peptide "PEP"
RVPSTSSSRVKT

SEQ ID NO: 84813 - protein, 12 aa, Artificial Sequence
  Building block peptide "PEP"
RVPSTSSTQVKT

SEQ ID NO: 84814 - protein, 12 aa, Artificial Sequence
  Building block peptide "PEP"
  MOD_RES (6), (7): Xaa is C or S
RVPSTXXAPTKT

SEQ ID NO: 84815 - protein, 12 aa, Artificial Sequence
  Building block peptide "PEP"
  MOD_RES (6), (7): Xaa is C or S
RVPSTXXAPVKT

SEQ ID NO: 84816 - protein, 12 aa, Artificial Sequence
  Building block peptide "PEP"
  MOD_RES (6), (7): Xaa is C or S
RVPSTXXTPTKT

SEQ ID NO: 84817 - protein, 12 aa, Artificial Sequence
  Building block peptide "PEP"
  MOD_RES (6), (7): Xaa is C or S
RVPSTXXVPAKT

SEQ ID NO: 84818 - protein, 12 aa, Artificial Sequence
  Building block peptide "PEP"
  MOD_RES (6), (7): Xaa is C or S
RVPSTXXVPEKT

SEQ ID NO: 84819 - protein, 12 aa, Artificial Sequence
  Building block peptide "PEP"
  MOD_RES (6), (7): Xaa is C or S
RVPSTXXVPQKT

SEQ ID NO: 84820 - protein, 12 aa, Artificial Sequence
  Building block peptide "PEP"
  MOD_RES (6), (7): Xaa is C or S
RVPSTXXVPTKT

SEQ ID NO: 84821 - protein, 12 aa, Artificial Sequence
  Building block peptide "PEP"
  MOD_RES (6), (7): Xaa is C or S
RVPSTXXVSQKT

SEQ ID NO: 84822 - protein, 12 aa, Artificial Sequence
  Building block peptide "PEP"
SIPKASSSRVEL

SEQ ID NO: 84823 - protein, 12 aa, Artificial Sequence
  Building block peptide "PEP"
SIPKASSTQVEL

SEQ ID NO: 84824 - protein, 12 aa, Artificial Sequence
  Building block peptide "PEP"
  MOD_RES (6), (7): Xaa is C or S
SIPKAXXAPTEL

SEQ ID NO: 84825 - protein, 12 aa, Artificial Sequence
  Building block peptide "PEP"
  MOD_RES (6), (7): Xaa is C or S
SIPKAXXAPVEL

SEQ ID NO: 84826 - protein, 12 aa, Artificial Sequence
  Building block peptide "PEP"
  MOD_RES (6), (7): Xaa is C or S
SIPKAXXTPTEL

SEQ ID NO: 84827 - protein, 12 aa, Artificial Sequence
  Building block peptide "PEP"
  MOD_RES (6), (7): Xaa is C or S
SIPKAXXVPAEL

SEQ ID NO: 84828 - protein, 12 aa, Artificial Sequence
  Building block peptide "PEP"
  MOD_RES (6), (7): Xaa is C or S
SIPKAXXVPEEL

SEQ ID NO: 84829 - protein, 12 aa, Artificial Sequence
  Building block peptide "PEP"
  MOD_RES (6), (7): Xaa is C or S
SIPKAXXVPQEL

SEQ ID NO: 84830 - protein, 12 aa, Artificial Sequence
  Building block peptide "PEP"
  MOD_RES (6), (7): Xaa is C or S
SIPKAXXVPTEL

SEQ ID NO: 84831 - protein, 12 aa, Artificial Sequence
  Building block peptide "PEP"
  MOD_RES (6), (7): Xaa is C or S
SIPKAXXVSQEL

SEQ ID NO: 84832 - protein, 12 aa, Artificial Sequence
  Building block peptide "PEP"
  MOD_RES (5), (5): Xaa is C or S
SSVKXQPAPTHH

SEQ ID NO: 84833 - protein, 12 aa, Artificial Sequence
  Building block peptide "PEP"
  MOD_RES (5), (5): Xaa is C or S
SSVKXQPAPVHH

SEQ ID NO: 84834 - protein, 12 aa, Artificial Sequence
  Building block peptide "PEP"
  MOD_RES (5), (5): Xaa is C or S
SSVKXQPSRVHH

SEQ ID NO: 84835 - protein, 12 aa, Artificial Sequence
  Building block peptide "PEP"
  MOD_RES (5), (5): Xaa is C or S
SSVKXQPTPTHH

SEQ ID NO: 84836 - protein, 12 aa, Artificial Sequence
  Building block peptide "PEP"
  MOD_RES (5), (5): Xaa is C or S
SSVKXQPTQVHH

SEQ ID NO: 84837 - protein, 12 aa, Artificial Sequence
  Building block peptide "PEP"
  MOD_RES (5), (5): Xaa is C or S
SSVKXQPVPAHH

SEQ ID NO: 84838 - protein, 12 aa, Artificial Sequence
  Building block peptide "PEP"
  MOD_RES (5), (5): Xaa is C or S
SSVKXQPVPEHH

SEQ ID NO: 84839 - protein, 12 aa, Artificial Sequence
  Building block peptide "PEP"
  MOD_RES (5), (5): Xaa is C or S
SSVKXQPVPQHH

SEQ ID NO: 84840 - protein, 12 aa, Artificial Sequence
  Building block peptide "PEP"
  MOD_RES (5), (5): Xaa is C or S
SSVKXQPVPTHH

SEQ ID NO: 84841 - protein, 12 aa, Artificial Sequence
  Building block peptide "PEP"
  MOD_RES (5), (5): Xaa is C or S
SSVKXQPVSQHH

SEQ ID NO: 84842 - protein, 12 aa, Artificial Sequence
  Building block peptide "PEP"
STPPTSSSRVRL

SEQ ID NO: 84843 - protein, 12 aa, Artificial Sequence
  Building block peptide "PEP"
STPPTSSTQVRL

SEQ ID NO: 84844 - protein, 12 aa, Artificial Sequence
  Building block peptide "PEP"
  MOD_RES (6), (7): Xaa is C or S
STPPTXXAPTRL

SEQ ID NO: 84845 - protein, 12 aa, Artificial Sequence
  Building block peptide "PEP"
  MOD_RES (6), (7): Xaa is C or S
STPPTXXAPVRL

SEQ ID NO: 84846 - protein, 12 aa, Artificial Sequence
  Building block peptide "PEP"
  MOD_RES (6), (7): Xaa is C or S
STPPTXXTPTRL

SEQ ID NO: 84847 - protein, 12 aa, Artificial Sequence
  Building block peptide "PEP"
  MOD_RES (6), (7): Xaa is C or S
STPPTXXVPARL

SEQ ID NO: 84848 - protein, 12 aa, Artificial Sequence
  Building block peptide "PEP"
  MOD_RES (6), (7): Xaa is C or S
STPPTXXVPERL

SEQ ID NO: 84849 - protein, 12 aa, Artificial Sequence
  Building block peptide "PEP"
  MOD_RES (6), (7): Xaa is C or S
STPPTXXVPQRL

SEQ ID NO: 84850 - protein, 12 aa, Artificial Sequence
  Building block peptide "PEP"
  MOD_RES (6), (7): Xaa is C or S
STPPTXXVPTRL

SEQ ID NO: 84851 - protein, 12 aa, Artificial Sequence
  Building block peptide "PEP"
  MOD_RES (6), (7): Xaa is C or S
STPPTXXVSQRL

SEQ ID NO: 84852 - protein, 12 aa, Artificial Sequence
  Building block peptide "PEP"
TVPKPSSSRVQL

SEQ ID NO: 84853 - protein, 12 aa, Artificial Sequence
  Building block peptide "PEP"
TVPKPSSTQVQL

SEQ ID NO: 84854 - protein, 12 aa, Artificial Sequence
  Building block peptide "PEP"
  MOD_RES (6), (7): Xaa is C or S
TVPKPXXAPTQL

SEQ ID NO: 84855 - protein, 12 aa, Artificial Sequence
  Building block peptide "PEP"
  MOD_RES (6), (7): Xaa is C or S
TVPKPXXAPVQL

SEQ ID NO: 84856 - protein, 12 aa, Artificial Sequence
  Building block peptide "PEP"
  MOD_RES (6), (7): Xaa is C or S
TVPKPXXTPTQL

SEQ ID NO: 84857 - protein, 12 aa, Artificial Sequence
  Building block peptide "PEP"
  MOD_RES (6), (7): Xaa is C or S
TVPKPXXVPAQL

SEQ ID NO: 84858 - protein, 12 aa, Artificial Sequence
  Building block peptide "PEP"
  MOD_RES (6), (7): Xaa is C or S
TVPKPXXVPEQL

SEQ ID NO: 84859 - protein, 12 aa, Artificial Sequence
  Building block peptide "PEP"
  MOD_RES (6), (7): Xaa is C or S
TVPKPXXVPQQL

SEQ ID NO: 84860 - protein, 12 aa, Artificial Sequence
  Building block peptide "PEP"
  MOD_RES (6), (7): Xaa is C or S
TVPKPXXVPTQL

SEQ ID NO: 84861 - protein, 12 aa, Artificial Sequence
  Building block peptide "PEP"
  MOD_RES (6), (7): Xaa is C or S
TVPKPXXVSQQL

SEQ ID NO: 84862 - protein, 12 aa, Artificial Sequence
  Building block peptide "PEP"
YVPKPSSSRVKL

SEQ ID NO: 84863 - protein, 12 aa, Artificial Sequence
  Building block peptide "PEP"
YVPKPSSTQVKL

SEQ ID NO: 84864 - protein, 12 aa, Artificial Sequence
  Building block peptide "PEP"
  MOD_RES (6), (7): Xaa is C or S
YVPKPXXAPTKL

SEQ ID NO: 84865 - protein, 12 aa, Artificial Sequence
  Building block peptide "PEP"
  MOD_RES (6), (7): Xaa is C or S
YVPKPXXAPVKL

SEQ ID NO: 84866 - protein, 12 aa, Artificial Sequence
  Building block peptide "PEP"
  MOD_RES (6), (7): Xaa is C or S
YVPKPXXTPTKL

SEQ ID NO: 84867 - protein, 12 aa, Artificial Sequence
  Building block peptide "PEP"
  MOD_RES (6), (7): Xaa is C or S
YVPKPXXVPAKL

SEQ ID NO: 84868 - protein, 12 aa, Artificial Sequence
  Building block peptide "PEP"
  MOD_RES (6), (7): Xaa is C or S
YVPKPXXVPEKL

SEQ ID NO: 84869 - protein, 12 aa, Artificial Sequence
  Building block peptide "PEP"
  MOD_RES (6), (7): Xaa is C or S
YVPKPXXVPQKL

SEQ ID NO: 84870 - protein, 12 aa, Artificial Sequence
  Building block peptide "PEP"
  MOD_RES (6), (7): Xaa is C or S
YVPKPXXVPTKL

SEQ ID NO: 84871 - protein, 12 aa, Artificial Sequence
  Building block peptide "PEP"
  MOD_RES (6), (7): Xaa is C or S
YVPKPXXVSQKL

SEQ ID NO: 84872 - protein, 5 aa, Artificial Sequence
  Building block peptide "PEP"
  MOD_RES (4), (4): Xaa is E, K, Q, R, A, D, G or H
  MOD_RES (5), (5): Xaa is L, M, T, E, Q or H
APTXX

SEQ ID NO: 84873 - protein, 5 aa, Artificial Sequence
  Building block peptide "PEP"
  MOD_RES (4), (4): Xaa is E, K, Q, R, A, D, G or H
  MOD_RES (5), (5): Xaa is L, M, T, E, Q or H
APVXX

SEQ ID NO: 84874 - protein, 8 aa, Artificial Sequence
  Building block peptide "PEP"
  MOD_RES (5), (5): Xaa is G, A, V, L, I, P, F, M, W, T or S
EPISXLYL

SEQ ID NO: 84875 - protein, 8 aa, Artificial Sequence
  Building block peptide "PEP"
  MOD_RES (5), (5): Xaa is G, A, V, L, I, P, F, M, W, T or S
EPLPXVYY

SEQ ID NO: 84876 - protein, 8 aa, Artificial Sequence
  Building block peptide "PEP"
  MOD_RES (5), (5): Xaa is G, A, V, L, I, P, F, M, W, T or S
EPLTXLYY

SEQ ID NO: 84877 - protein, 8 aa, Artificial Sequence
  Building block peptide "PEP"
  MOD_RES (5), (5): Xaa is G, A, V, L, I, P, F, M, W, T or S
KPLSXLYV

SEQ ID NO: 84878 - protein, 8 aa, Artificial Sequence
  Building block peptide "PEP"
  MOD_RES (5), (5): Xaa is G, A, V, L, I, P, F, M, W, T or S
NAISXLYF

SEQ ID NO: 84879 - protein, 8 aa, Artificial Sequence
  Building block peptide "PEP"
  MOD_RES (5), (5): Xaa is G, A, V, L, I, P, F, M, W, T or S
RPVQXRKI

SEQ ID NO: 84880 - protein, 8 aa, Artificial Sequence
  Building block peptide "PEP"
  MOD_RES (5), (5): Xaa is G, A, V, L, I, P, F, M, W, T or S
RSVKXAKV

SEQ ID NO: 84881 - protein, 8 aa, Artificial Sequence
  Building block peptide "PEP"
  MOD_RES (5), (5): Xaa is G, A, V, L, I, P, F, M, W, T or S
SAISXLYL

SEQ ID NO: 84882 - protein, 8 aa, Artificial Sequence
  Building block peptide "PEP"
  MOD_RES (5), (5): Xaa is G, A, V, L, I, P, F, M, W, T or S
SATSXLYY

SEQ ID NO: 84883 - protein, 8 aa, Artificial Sequence
  Building block peptide "PEP"
  MOD_RES (5), (5): Xaa is G, A, V, L, I, P, F, M, W, T or S
SNITXQIM

SEQ ID NO: 84884 - protein, 8 aa, Artificial Sequence
  Building block peptide "PEP"
  MOD_RES (5), (5): Xaa is G, A, V, L, I, P, F, M, W, T or S
SPINXLYF

SEQ ID NO: 84885 - protein, 8 aa, Artificial Sequence
  Building block peptide "PEP"
  MOD_RES (5), (5): Xaa is G, A, V, L, I, P, F, M, W, T or S
SPISXLFI

SEQ ID NO: 84886 - protein, 8 aa, Artificial Sequence
  Building block peptide "PEP"
  MOD_RES (5), (5): Xaa is G, A, V, L, I, P, F, M, W, T or S
SPISXLYI

SEQ ID NO: 84887 - protein, 8 aa, Artificial Sequence
  Building block peptide "PEP"
  MOD_RES (5), (5): Xaa is G, A, V, L, I, P, F, M, W, T or S
SPISXLYK

SEQ ID NO: 84888 - protein, 5 aa, Artificial Sequence
  Building block peptide "PEP"
  MOD_RES (4), (4): Xaa is E, K, Q, R, A, D, G or H
  MOD_RES (5), (5): Xaa is L, M, T, E, Q or H
SRVXX

SEQ ID NO: 84889 - protein, 8 aa, Artificial Sequence
  Building block peptide "PEP"
  MOD_RES (5), (5): Xaa is G, A, V, L, I, P, F, M, W, T or S
SSLSXLFF

SEQ ID NO: 84890 - protein, 5 aa, Artificial Sequence
  Building block peptide "PEP"
  MOD_RES (4), (4): Xaa is E, K, Q, R, A, D, G or H
  MOD_RES (5), (5): Xaa is L, M, T, E, Q or H
TPTXX

SEQ ID NO: 84891 - protein, 5 aa, Artificial Sequence
  Building block peptide "PEP"
  MOD_RES (4), (4): Xaa is E, K, Q, R, A, D, G or H
  MOD_RES (5), (5): Xaa is L, M, T, E, Q or H
TQVXX

SEQ ID NO: 84892 - protein, 5 aa, Artificial Sequence
  Building block peptide "PEP"
  MOD_RES (4), (4): Xaa is E, K, Q, R, A, D, G or H
  MOD_RES (5), (5): Xaa is L, M, T, E, Q or H
VPAXX

SEQ ID NO: 84893 - protein, 5 aa, Artificial Sequence
  Building block peptide "PEP"
  MOD_RES (4), (4): Xaa is E, K, Q, R, A, D, G or H
  MOD_RES (5), (5): Xaa is L, M, T, E, Q or H
VPEXX

SEQ ID NO: 84894 - protein, 5 aa, Artificial Sequence
  Building block peptide "PEP"
  MOD_RES (4), (4): Xaa is E, K, Q, R, A, D, G or H
  MOD_RES (5), (5): Xaa is L, M, T, E, Q or H
VPQXX

SEQ ID NO: 84895 - protein, 5 aa, Artificial Sequence
  Building block peptide "PEP"
  MOD_RES (4), (4): Xaa is E, K, Q, R, A, D, G or H
  MOD_RES (5), (5): Xaa is L, M, T, E, Q or H
VPTXX

SEQ ID NO: 84896 - protein, 5 aa, Artificial Sequence
  Building block peptide "PEP"
  MOD_RES (4), (4): Xaa is E, K, Q, R, A, D, G or H
  MOD_RES (5), (5): Xaa is L, M, T, E, Q or H
VSQXX

SEQ ID NO: 84897 - protein, 12 aa, Artificial Sequence
  Building block peptide "PEP"
  MOD_RES (6), (7): Xaa is C or S
  MOD_RES (11), (11): Xaa is E, K, Q, R, A, D, G or H
  MOD_RES (12), (12): Xaa is L, M, T, E, Q or H
AAPASXXVPAXX

SEQ ID NO: 84898 - protein, 12 aa, Artificial Sequence
  Building block peptide "PEP"
  MOD_RES (6), (7): Xaa is C or S
  MOD_RES (11), (11): Xaa is E, K, Q, R, A, D, G or H
  MOD_RES (12), (12): Xaa is L, M, T, E, Q or H
ASAAPXXVPQXX

SEQ ID NO: 84899 - protein, 12 aa, Artificial Sequence
  Building block peptide "PEP"
  MOD_RES (6), (7): Xaa is C or S
  MOD_RES (11), (11): Xaa is E, K, Q, R, A, D, G or H
  MOD_RES (12), (12): Xaa is L, M, T, E, Q or H
ASASPXXVPQXX

SEQ ID NO: 84900 - protein, 12 aa, Artificial Sequence
  Building block peptide "PEP"
  MOD_RES (6), (7): Xaa is C or S
  MOD_RES (11), (11): Xaa is E, K, Q, R, A, D, G or H
  MOD_RES (12), (12): Xaa is L, M, T, E, Q or H
ASASPXXVSQXX

SEQ ID NO: 84901 - protein, 12 aa, Artificial Sequence
  Building block peptide "PEP"
  MOD_RES (6), (7): Xaa is C or S
  MOD_RES (11), (11): Xaa is E, K, Q, R, A, D, G or H
  MOD_RES (12), (12): Xaa is L, M, T, E, Q or H
AVPKAXXAPTXX

SEQ ID NO: 84902 - protein, 12 aa, Artificial Sequence
  Building block peptide "PEP"
  MOD_RES (6), (7): Xaa is C or S
  MOD_RES (11), (11): Xaa is E, K, Q, R, A, D, G or H
  MOD_RES (12), (12): Xaa is L, M, T, E, Q or H
GIPEPXXVPEXX

SEQ ID NO: 84903 - protein, 12 aa, Artificial Sequence
  Building block peptide "PEP"
  MOD_RES (6), (7): Xaa is C or S
  MOD_RES (11), (11): Xaa is E, K, Q, R, A, D, G or H
  MOD_RES (12), (12): Xaa is L, M, T, E, Q or H
GSAGPXXTPTXX

SEQ ID NO: 84904 - protein, 12 aa, Artificial Sequence
  Building block peptide "PEP"
  MOD_RES (6), (7): Xaa is C or S
  MOD_RES (11), (11): Xaa is E, K, Q, R, A, D, G or H
  MOD_RES (12), (12): Xaa is L, M, T, E, Q or H
HVPKPXXAPTXX

SEQ ID NO: 84905 - protein, 12 aa, Artificial Sequence
  Building block peptide "PEP"
  MOD_RES (7), (7): Xaa is C or S
  MOD_RES (11), (11): Xaa is E, K, Q, R, A, D, G or H
  MOD_RES (12), (12): Xaa is L, M, T, E, Q or H
HVTKPTXAPTXX

SEQ ID NO: 84906 - protein, 12 aa, Artificial Sequence
  Building block peptide "PEP"
  MOD_RES (6), (7): Xaa is C or S
  MOD_RES (11), (11): Xaa is E, K, Q, R, A, D, G or H
  MOD_RES (12), (12): Xaa is L, M, T, E, Q or H
KASKAXXVPTXX

SEQ ID NO: 84907 - protein, 12 aa, Artificial Sequence
  Building block peptide "PEP"
  MOD_RES (6), (7): Xaa is C or S
  MOD_RES (11), (11): Xaa is E, K, Q, R, A, D, G or H
  MOD_RES (12), (12): Xaa is L, M, T, E, Q or H
KIPKAXXVPTXX

SEQ ID NO: 84908 - protein, 12 aa, Artificial Sequence
  Building block peptide "PEP"
  MOD_RES (6), (7): Xaa is C or S
  MOD_RES (11), (11): Xaa is E, K, Q, R, A, D, G or H
  MOD_RES (12), (12): Xaa is L, M, T, E, Q or H
KVGKAXXVPTXX

SEQ ID NO: 84909 - protein, 12 aa, Artificial Sequence
  Building block peptide "PEP"
  MOD_RES (7), (7): Xaa is C or S
  MOD_RES (11), (11): Xaa is E, K, Q, R, A, D, G or H
  MOD_RES (12), (12): Xaa is L, M, T, E, Q or H
NDEGLEXVPTXX

SEQ ID NO: 84910 - protein, 12 aa, Artificial Sequence
  Building block peptide "PEP"
  MOD_RES (5), (5): Xaa is C or S
  MOD_RES (11), (11): Xaa is E, K, Q, R, A, D, G or H
  MOD_RES (12), (12): Xaa is L, M, T, E, Q or H
RNVQXRPTQVXX

SEQ ID NO: 84911 - protein, 12 aa, Artificial Sequence
  Building block peptide "PEP"
  MOD_RES (6), (7): Xaa is C or S
  MOD_RES (11), (11): Xaa is E, K, Q, R, A, D, G or H
  MOD_RES (12), (12): Xaa is L, M, T, E, Q or H
RVPSTXXAPVXX

SEQ ID NO: 84912 - protein, 12 aa, Artificial Sequence
  Building block peptide "PEP"
  MOD_RES (6), (7): Xaa is C or S
  MOD_RES (11), (11): Xaa is E, K, Q, R, A, D, G or H
  MOD_RES (12), (12): Xaa is L, M, T, E, Q or H
SIPKAXXVPTXX

SEQ ID NO: 84913 - protein, 12 aa, Artificial Sequence
  Building block peptide "PEP"
  MOD_RES (5), (5): Xaa is C or S
  MOD_RES (11), (11): Xaa is E, K, Q, R, A, D, G or H
  MOD_RES (12), (12): Xaa is L, M, T, E, Q or H
SSVKXQPSRVXX

SEQ ID NO: 84914 - protein, 12 aa, Artificial Sequence
  Building block peptide "PEP"
  MOD_RES (6), (7): Xaa is C or S
  MOD_RES (11), (11): Xaa is E, K, Q, R, A, D, G or H
  MOD_RES (12), (12): Xaa is L, M, T, E, Q or H
STPPTXXVPTXX

SEQ ID NO: 84915 - protein, 12 aa, Artificial Sequence
  Building block peptide "PEP"
  MOD_RES (6), (7): Xaa is C or S
  MOD_RES (11), (11): Xaa is E, K, Q, R, A, D, G or H
  MOD_RES (12), (12): Xaa is L, M, T, E, Q or H
TVPKPXXAPTXX

SEQ ID NO: 84916 - protein, 12 aa, Artificial Sequence
  Building block peptide "PEP"
  MOD_RES (6), (7): Xaa is C or S
  MOD_RES (11), (11): Xaa is E, K, Q, R, A, D, G or H
  MOD_RES (12), (12): Xaa is L, M, T, E, Q or H
YVPKPXXAPTXX

SEQ ID NO: 84917 - protein, 7 aa, Artificial Sequence
  Building block peptide "PEP"
  MOD_RES (1), (1): Xaa is absent or any acidic amino acid
  MOD_RES (2), (2): Xaa is any acidic amino acid or is any apolar amino acid
  MOD_RES (3), (3): Xaa is any acidic amino acid or is any apolar amino acid
  MOD_RES (4), (4): Xaa is absent or any polar amino acid
XXXXAVS

SEQ ID NO: 84918 - protein, 7 aa, Artificial Sequence
  Building block peptide "PEP"
  MOD_RES (1), (1): Xaa is absent or any acidic amino acid
  MOD_RES (2), (2): Xaa is any acidic amino acid or is any apolar amino acid
  MOD_RES (3), (3): Xaa is any acidic amino acid or is any apolar amino acid
  MOD_RES (4), (4): Xaa is absent or any polar amino acid
XXXXEDH

SEQ ID NO: 84919 - protein, 7 aa, Artificial Sequence
  Building block peptide "PEP"
  MOD_RES (1), (1): Xaa is absent or any acidic amino acid
  MOD_RES (2), (2): Xaa is any acidic amino acid or is any apolar amino acid
  MOD_RES (3), (3): Xaa is any acidic amino acid or is any apolar amino acid
  MOD_RES (4), (4): Xaa is absent or any polar amino acid
XXXXEEH

SEQ ID NO: 84920 - protein, 7 aa, Artificial Sequence
  Building block peptide "PEP"
  MOD_RES (1), (1): Xaa is absent or any acidic amino acid
  MOD_RES (2), (2): Xaa is any acidic amino acid or is any apolar amino acid
  MOD_RES (3), (3): Xaa is any acidic amino acid or is any apolar amino acid
  MOD_RES (4), (4): Xaa is absent or any polar amino acid
XXXXEHS

SEQ ID NO: 84921 - protein, 7 aa, Artificial Sequence
  Building block peptide "PEP"
  MOD_RES (1), (1): Xaa is absent or any acidic amino acid
  MOD_RES (2), (2): Xaa is any acidic amino acid or is any apolar amino acid
  MOD_RES (3), (3): Xaa is any acidic amino acid or is any apolar amino acid
  MOD_RES (4), (4): Xaa is absent or any polar amino acid
XXXXQHN

SEQ ID NO: 84922 - protein, 7 aa, Artificial Sequence
  Building block peptide "PEP"
  MOD_RES (1), (1): Xaa is absent or any acidic amino acid
  MOD_RES (2), (2): Xaa is any acidic amino acid or is any apolar amino acid
  MOD_RES (3), (3): Xaa is any acidic amino acid or is any apolar amino acid
  MOD_RES (4), (4): Xaa is absent or any polar amino acid
XXXXTVE

SEQ ID NO: 84923 - protein, 7 aa, Artificial Sequence
  Building block peptide "PEP"
  MOD_RES (1), (1): Xaa is absent or any acidic amino acid
  MOD_RES (2), (2): Xaa is any acidic amino acid or is any apolar amino acid
  MOD_RES (3), (3): Xaa is any acidic amino acid or is any apolar amino acid
  MOD_RES (4), (4): Xaa is absent or any polar amino acid
XXXXVAE

SEQ ID NO: 84924 - protein, 7 aa, Artificial Sequence
  Building block peptide "PEP"
  MOD_RES (1), (1): Xaa is absent or any acidic amino acid
  MOD_RES (2), (2): Xaa is any acidic amino acid or is any apolar amino acid
  MOD_RES (3), (3): Xaa is any acidic amino acid or is any apolar amino acid
  MOD_RES (4), (4): Xaa is absent or any polar amino acid
XXXXVEE

SEQ ID NO: 84925 - protein, 7 aa, Artificial Sequence
  Building block peptide "PEP"
  MOD_RES (1), (1): Xaa is absent or any acidic amino acid
  MOD_RES (2), (2): Xaa is any acidic amino acid or is any apolar amino acid
  MOD_RES (3), (3): Xaa is any acidic amino acid or is any apolar amino acid
  MOD_RES (4), (4): Xaa is absent or any polar amino acid
XXXXVKS

SEQ ID NO: 84926 - protein, 7 aa, Artificial Sequence
  Building block peptide "PEP"
  MOD_RES (1), (1): Xaa is absent or any acidic amino acid
  MOD_RES (2), (2): Xaa is any acidic amino acid or is any apolar amino acid
  MOD_RES (3), (3): Xaa is any acidic amino acid or is any apolar amino acid
  MOD_RES (4), (4): Xaa is absent or any polar amino acid
XXXXVRS

SEQ ID NO: 84927 - protein, 7 aa, Artificial Sequence
  Building block peptide "PEP"
  MOD_RES (1), (1): Xaa is absent or any acidic amino acid
  MOD_RES (2), (2): Xaa is any acidic amino acid or is any apolar amino acid
  MOD_RES (3), (3): Xaa is any acidic amino acid or is any apolar amino acid
  MOD_RES (4), (4): Xaa is absent or any polar amino acid
XXXXVVD

SEQ ID NO: 84928 - protein, 7 aa, Artificial Sequence
  Building block peptide "PEP"
  MOD_RES (1), (1): Xaa is absent or any acidic amino acid
  MOD_RES (2), (2): Xaa is any acidic amino acid or is any apolar amino acid
  MOD_RES (3), (3): Xaa is any acidic amino acid or is any apolar amino acid
  MOD_RES (4), (4): Xaa is absent or any polar amino acid
XXXXVVE

SEQ ID NO: 84929 - protein, 7 aa, Artificial Sequence
  Building block peptide "PEP"
  MOD_RES (1), (1): Xaa is absent or any acidic amino acid
  MOD_RES (2), (2): Xaa is any acidic amino acid or is any apolar amino acid
  MOD_RES (3), (3): Xaa is any acidic amino acid or is any apolar amino acid
  MOD_RES (4), (4): Xaa is absent or any polar amino acid
XXXXVVK

SEQ ID NO: 84930 - protein, 7 aa, Artificial Sequence
  Building block peptide "PEP"
  MOD_RES (1), (1): Xaa is absent or any acidic amino acid
  MOD_RES (2), (2): Xaa is any acidic amino acid or is any apolar amino acid
  MOD_RES (3), (3): Xaa is any acidic amino acid or is any apolar amino acid
  MOD_RES (4), (4): Xaa is absent or any polar amino acid
XXXXVVR

SEQ ID NO: 84931 - protein, 11 aa, Artificial Sequence
  Building block peptide "PEP"
  MOD_RES (8), (10): Xaa is C or S
  MOD_RES (1), (1): Xaa is absent or any acidic amino acid
  MOD_RES (2), (2): Xaa is any acidic amino acid or is any apolar amino acid
  MOD_RES (3), (3): Xaa is any acidic amino acid or is any apolar amino acid
  MOD_RES (4), (4): Xaa is absent or any polar amino acid
XXXXVAEXGXR

SEQ ID NO: 84932 - protein, 11 aa, Artificial Sequence
  Building block peptide "PEP"
  MOD_RES (8), (10): Xaa is C or S
  MOD_RES (1), (1): Xaa is absent or any acidic amino acid
  MOD_RES (2), (2): Xaa is any acidic amino acid or is any apolar amino acid
  MOD_RES (3), (3): Xaa is any acidic amino acid or is any apolar amino acid
  MOD_RES (4), (4): Xaa is absent or any polar amino acid
XXXXVEEXGXL

SEQ ID NO: 84933 - protein, 11 aa, Artificial Sequence
  Building block peptide "PEP"
  MOD_RES (8), (10): Xaa is C or S
  MOD_RES (1), (1): Xaa is absent or any acidic amino acid
  MOD_RES (2), (2): Xaa is any acidic amino acid or is any apolar amino acid
  MOD_RES (3), (3): Xaa is any acidic amino acid or is any apolar amino acid
  MOD_RES (4), (4): Xaa is absent or any polar amino acid
XXXXVKSXKXS

SEQ ID NO: 84934 - protein, 11 aa, Artificial Sequence
  Building block peptide "PEP"
  MOD_RES (8), (10): Xaa is C or S
  MOD_RES (1), (1): Xaa is absent or any acidic amino acid
  MOD_RES (2), (2): Xaa is any acidic amino acid or is any apolar amino acid
  MOD_RES (3), (3): Xaa is any acidic amino acid or is any apolar amino acid
  MOD_RES (4), (4): Xaa is absent or any polar amino acid
XXXXVRSXKXS

SEQ ID NO: 84935 - protein, 12 aa, Artificial Sequence
  Building block peptide "PEP"
  MOD_RES (9), (11): Xaa is C or S
  MOD_RES (1), (1): Xaa is absent or any acidic amino acid
  MOD_RES (2), (2): Xaa is any acidic amino acid or is any apolar amino acid
  MOD_RES (3), (3): Xaa is any acidic amino acid or is any apolar amino acid
  MOD_RES (4), (4): Xaa is absent or any polar amino acid
XXXXAVSEXGXR

SEQ ID NO: 84936 - protein, 12 aa, Artificial Sequence
  Building block peptide "PEP"
  MOD_RES (9), (11): Xaa is C or S
  MOD_RES (1), (1): Xaa is absent or any acidic amino acid
  MOD_RES (2), (2): Xaa is any acidic amino acid or is any apolar amino acid
  MOD_RES (3), (3): Xaa is any acidic amino acid or is any apolar amino acid
  MOD_RES (4), (4): Xaa is absent or any polar amino acid
XXXXEHSQXEXR

SEQ ID NO: 84937 - protein, 12 aa, Artificial Sequence
  Building block peptide "PEP"
  MOD_RES (9), (11): Xaa is C or S
  MOD_RES (1), (1): Xaa is absent or any acidic amino acid
  MOD_RES (2), (2): Xaa is any acidic amino acid or is any apolar amino acid
  MOD_RES (3), (3): Xaa is any acidic amino acid or is any apolar amino acid
  MOD_RES (4), (4): Xaa is absent or any polar amino acid
XXXXQHNKXEXR

SEQ ID NO: 84938 - protein, 12 aa, Artificial Sequence
  Building block peptide "PEP"
  MOD_RES (9), (11): Xaa is C or S
  MOD_RES (1), (1): Xaa is absent or any acidic amino acid
  MOD_RES (2), (2): Xaa is any acidic amino acid or is any apolar amino acid
  MOD_RES (3), (3): Xaa is any acidic amino acid or is any apolar amino acid
  MOD_RES (4), (4): Xaa is absent or any polar amino acid
XXXXTVESXAXR

SEQ ID NO: 84939 - protein, 12 aa, Artificial Sequence
  Building block peptide "PEP"
  MOD_RES (9), (11): Xaa is C or S
  MOD_RES (1), (1): Xaa is absent or any acidic amino acid
  MOD_RES (2), (2): Xaa is any acidic amino acid or is any apolar amino acid
  MOD_RES (3), (3): Xaa is any acidic amino acid or is any apolar amino acid
  MOD_RES (4), (4): Xaa is absent or any polar amino acid
XXXXVVDRXGXS

SEQ ID NO: 84940 - protein, 12 aa, Artificial Sequence
  Building block peptide "PEP"
  MOD_RES (9), (11): Xaa is C or S
  MOD_RES (1), (1): Xaa is absent or any acidic amino acid
  MOD_RES (2), (2): Xaa is any acidic amino acid or is any apolar amino acid
  MOD_RES (3), (3): Xaa is any acidic amino acid or is any apolar amino acid
  MOD_RES (4), (4): Xaa is absent or any polar amino acid
XXXXVVEAXGXR

SEQ ID NO: 84941 - protein, 12 aa, Artificial Sequence
  Building block peptide "PEP"
  MOD_RES (9), (11): Xaa is C or S
  MOD_RES (1), (1): Xaa is absent or any acidic amino acid
  MOD_RES (2), (2): Xaa is any acidic amino acid or is any apolar amino acid
  MOD_RES (3), (3): Xaa is any acidic amino acid or is any apolar amino acid
  MOD_RES (4), (4): Xaa is absent or any polar amino acid
XXXXVVEGXGXR

SEQ ID NO: 84942 - protein, 12 aa, Artificial Sequence
  Building block peptide "PEP"
  MOD_RES (9), (11): Xaa is C or S
  MOD_RES (1), (1): Xaa is absent or any acidic amino acid
  MOD_RES (2), (2): Xaa is any acidic amino acid or is any apolar amino acid
  MOD_RES (3), (3): Xaa is any acidic amino acid or is any apolar amino acid
  MOD_RES (4), (4): Xaa is absent or any polar amino acid
XXXXVVESXGXR

SEQ ID NO: 84943 - protein, 12 aa, Artificial Sequence
  Building block peptide "PEP"
  MOD_RES (9), (11): Xaa is C or S
  MOD_RES (1), (1): Xaa is absent or any acidic amino acid
  MOD_RES (2), (2): Xaa is any acidic amino acid or is any apolar amino acid
  MOD_RES (3), (3): Xaa is any acidic amino acid or is any apolar amino acid
  MOD_RES (4), (4): Xaa is absent or any polar amino acid
XXXXVVKAXGXH

SEQ ID NO: 84944 - protein, 12 aa, Artificial Sequence
  Building block peptide "PEP"
  MOD_RES (9), (11): Xaa is C or S
  MOD_RES (1), (1): Xaa is absent or any acidic amino acid
  MOD_RES (2), (2): Xaa is any acidic amino acid or is any apolar amino acid
  MOD_RES (3), (3): Xaa is any acidic amino acid or is any apolar amino acid
  MOD_RES (4), (4): Xaa is absent or any polar amino acid
XXXXVVRAXGXH

SEQ ID NO: 84945 - protein, 12 aa, Artificial Sequence
  Building block peptide "PEP"
  MOD_RES (9), (11): Xaa is C or S
  MOD_RES (1), (1): Xaa is absent or any acidic amino acid
  MOD_RES (2), (2): Xaa is any acidic amino acid or is any apolar amino acid
  MOD_RES (3), (3): Xaa is any acidic amino acid or is any apolar amino acid
  MOD_RES (4), (4): Xaa is absent or any polar amino acid
XXXXVVRSXGXH

SEQ ID NO: 84946 - protein, 13 aa, Artificial Sequence
  Building block peptide "PEP"
  MOD_RES (10), (12): Xaa is C or S
  MOD_RES (1), (1): Xaa is absent or any acidic amino acid
  MOD_RES (2), (2): Xaa is any acidic amino acid or is any apolar amino acid
  MOD_RES (3), (3): Xaa is any acidic amino acid or is any apolar amino acid
  MOD_RES (4), (4): Xaa is absent or any polar amino acid
XXXXEDHLAXKXE

SEQ ID NO: 84947 - protein, 13 aa, Artificial Sequence
  Building block peptide "PEP"
  MOD_RES (10), (12): Xaa is C or S
  MOD_RES (1), (1): Xaa is absent or any acidic amino acid
  MOD_RES (2), (2): Xaa is any acidic amino acid or is any apolar amino acid
  MOD_RES (3), (3): Xaa is any acidic amino acid or is any apolar amino acid
  MOD_RES (4), (4): Xaa is absent or any polar amino acid
XXXXEEHLEXAXA

SEQ ID NO: 84948 - protein, 7 aa, Artificial Sequence
  Building block peptide "PEP"
  MOD_RES (1), (1): Xaa is absent or any amino acid
  MOD_RES (2), (2): Xaa is absent or any amino acid
  MOD_RES (3), (3): Xaa is absent or any amino acid
  MOD_RES (4), (4): Xaa is absent or any amino acid
  MOD_RES (5), (5): Xaa is absent or any amino acid
  MOD_RES (6), (6): Xaa is absent or S, T, C, E, Q, P or R
  MOD_RES (7), (7): Xaa is absent or S, T, C, E, Q, P or R, and at least one Xaa is not absent
XXXXXXX

SEQ ID NO: 84949 - protein, 6 aa, Artificial Sequence
  Building block peptide "PEP"
  MOD_RES (1), (1): Xaa is absent or any amino acid at the exeption of any aromatic amino acid
  MOD_RES (2), (2): Xaa is absent or any acidic amino acid or any aliphatic amino acid
  MOD_RES (3), (3): Xaa is absent or any polar amino acid
  MOD_RES (4), (4): Xaa is absent or any acidic amino acid or any aliphatic amino acid
  MOD_RES (5), (5): Xaa is absent or any polar amino acid
  MOD_RES (6), (6): Xaa is absent or any amino acid, and at least one of Xaa is not absent
XXXXXX

SEQ ID NO: 84950 - protein, 5 aa, Artificial Sequence
  Example of LINKER
AAAAA

SEQ ID NO: 84951 - protein, 7 aa, Artificial Sequence
  Example of LINKER
AAAAAAA

SEQ ID NO: 84952 - protein, 9 aa, Artificial Sequence
  Example of LINKER
AAAAAAAAA

SEQ ID NO: 84953 - protein, 9 aa, Artificial Sequence
  Example of LINKER
  MOD_RES (2), (2): Xaa is any amino acid
  MOD_RES (1), (3), (4), (5): Xaa is any polar amino acid
  MOD_RES (6), (7): Xaa is G, A, V, L, I, P, M, K, R, H, Y or E
  MOD_RES (8), (9): Xaa is absent, any polar amino acid, or any basic amino acid
XXXXXXXXX

SEQ ID NO: 84954 - protein, 9 aa, Artificial Sequence
  Example of LINKER
  MOD_RES (2), (3): Xaa is any amino acid
  MOD_RES (4), (5): Xaa is any polar amino acid
  MOD_RES (1), (1): Xaa is any acidic amino acid
  MOD_RES (6), (7): Xaa is G, A, V, L, I, P, M, K, R, H, Y or E
  MOD_RES (8), (9): Xaa is absent, any polar amino acid, or any basic amino acid
XXXXXXXXX

SEQ ID NO: 84955 - protein, 9 aa, Artificial Sequence
  Example of LINKER
  MOD_RES (2), (3): Xaa is any amino acid
  MOD_RES (4), (4): Xaa is any polar amino acid
  MOD_RES (1), (1): Xaa is any acidic amino acid
  MOD_RES (5), (5): Xaa is any basic amino acid
  MOD_RES (6), (7): Xaa is G, A, V, L, I, P, M, K, R, H, Y or E
  MOD_RES (8), (9): Xaa is absent, any polar amino acid, or any basic amino acid
XXXXXXXXX

SEQ ID NO: 84956 - protein, 9 aa, Artificial Sequence
  Example of LINKER
  MOD_RES (2), (2): Xaa is any amino acid
  MOD_RES (3), (4): Xaa is any polar amino acid
  MOD_RES (1), (1): Xaa is any acidic amino acid
  MOD_RES (5), (5): Xaa is any basic amino acid
  MOD_RES (6), (7): Xaa is G, A, V, L, I, P, M, K, R, H, Y or E
  MOD_RES (8), (9): Xaa is absent, any polar amino acid, or any basic amino acid
XXXXXXXXX

SEQ ID NO: 84957 - protein, 9 aa, Artificial Sequence
  Example of LINKER
  MOD_RES (2), (2): Xaa is any amino acid
  MOD_RES (3), (3): Xaa is any polar amino acid
  MOD_RES (1), (1): Xaa is any acidic amino acid
  MOD_RES (4), (5): Xaa is any aliphatic amino acid
  MOD_RES (6), (7): Xaa is G, A, V, L, I, P, M, K, R, H, Y or E
  MOD_RES (8), (9): Xaa is absent, any polar amino acid, or any basic amino acid
XXXXXXXXX

SEQ ID NO: 84958 - protein, 9 aa, Artificial Sequence
  Example of LINKER
  MOD_RES (2), (2): Xaa is any amino acid
  MOD_RES (4), (4): Xaa is any polar amino acid
  MOD_RES (1), (1): Xaa is any acidic amino acid
  MOD_RES (3), (3): Xaa is any aromatic amino acid
  MOD_RES (5), (5): Xaa is any basic amino acid
  MOD_RES (6), (7): Xaa is G, A, V, L, I, P, M, K, R, H, Y or E
  MOD_RES (8), (9): Xaa is absent, any polar amino acid, or any basic amino acid
XXXXXXXXX

SEQ ID NO: 84959 - protein, 9 aa, Artificial Sequence
  Example of LINKER
  MOD_RES (3), (5): Xaa is any polar amino acid
  MOD_RES (1), (2): Xaa is any acidic amino acid
  MOD_RES (4), (4): Xaa is any basic amino acid
  MOD_RES (6), (7): Xaa is G, A, V, L, I, P, M, K, R, H, Y or E
  MOD_RES (8), (9): Xaa is absent, any polar amino acid, or any basic amino acid
XXXXXXXXX

SEQ ID NO: 84960 - protein, 8 aa, Artificial Sequence
  Example of LINKER
  MOD_RES (4), (4): Xaa is any polar amino acid
  MOD_RES (1), (2): Xaa is any apolar amino acid
  MOD_RES (3), (3): Xaa is any basic amino acid
  MOD_RES (5), (6): Xaa is G, A, V, L, I, P, M, K, R, H, Y or E
  MOD_RES (7), (8): Xaa is absent, any polar amino acid, or any basic amino acid
XXXXXXXX

SEQ ID NO: 84961 - protein, 8 aa, Artificial Sequence
  Example of LINKER
  MOD_RES (1), (2): Xaa is any apolar amino acid
  MOD_RES (3), (4): Xaa is any basic amino acid
  MOD_RES (5), (6): Xaa is G, A, V, L, I, P, M, K, R, H, Y or E
  MOD_RES (7), (8): Xaa is absent, any polar amino acid, or any basic amino acid
XXXXXXXX

SEQ ID NO: 84962 - protein, 8 aa, Artificial Sequence
  Example of LINKER
  MOD_RES (4), (4): Xaa is any polar amino acid
  MOD_RES (2), (2): Xaa is any apolar amino acid
  MOD_RES (3), (3): Xaa is any basic amino acid
  MOD_RES (1), (1): Xaa is L or I
  MOD_RES (5), (6): Xaa is G, A, V, L, I, P, M, K, R, H, Y or E
  MOD_RES (7), (8): Xaa is absent, any polar amino acid, or any basic amino acid
XXXXXXXX

SEQ ID NO: 84963 - protein, 7 aa, Artificial Sequence
  Example of LINKER
DAANNVV

SEQ ID NO: 84964 - protein, 7 aa, Artificial Sequence
  Example of LINKER
DDMGVPT

SEQ ID NO: 84965 - protein, 7 aa, Artificial Sequence
  Example of LINKER
DDSSNVI

SEQ ID NO: 84966 - protein, 7 aa, Artificial Sequence
  Example of LINKER
DENEKVV

SEQ ID NO: 84967 - protein, 7 aa, Artificial Sequence
  Example of LINKER
DENKNVV

SEQ ID NO: 84968 - protein, 7 aa, Artificial Sequence
  Example of LINKER
DEYDKVV

SEQ ID NO: 84969 - protein, 7 aa, Artificial Sequence
  Example of LINKER
DKGVVTY

SEQ ID NO: 84970 - protein, 7 aa, Artificial Sequence
  Example of LINKER
DNGRVLL

SEQ ID NO: 84971 - protein, 7 aa, Artificial Sequence
  Example of LINKER
DSANNVV

SEQ ID NO: 84972 - protein, 7 aa, Artificial Sequence
  Example of LINKER
DSSNNVI

SEQ ID NO: 84973 - protein, 9 aa, Artificial Sequence
  Example of LINKER
EIVRKKPIF

SEQ ID NO: 84974 - protein, 9 aa, Artificial Sequence
  Example of LINKER
EYVRKKPKL

SEQ ID NO: 84975 - protein, 5 aa, Artificial Sequence
  Example of LINKER
GGGGG

SEQ ID NO: 84976 - protein, 7 aa, Artificial Sequence
  Example of LINKER
GGGGGGG

SEQ ID NO: 84977 - protein, 9 aa, Artificial Sequence
  Example of LINKER
GGGGGGGGG

SEQ ID NO: 84978 - protein, 7 aa, Artificial Sequence
  Example of LINKER
IGKTPKI

SEQ ID NO: 84979 - protein, 7 aa, Artificial Sequence
  Example of LINKER
NDKQQII

SEQ ID NO: 84980 - protein, 9 aa, Artificial Sequence
  Example of LINKER
RIKPHQGQH

SEQ ID NO: 84981 - protein, 7 aa, Artificial Sequence
  Example of LINKER
VGRKPKV

SEQ ID NO: 84982 - protein, 7 aa, Artificial Sequence
  Example of LINKER
VGRTPKV

SEQ ID NO: 84983 - protein, 5 aa, Artificial Sequence
  Example of Bioactive carrier-affinity-contaning group
GTPGP

SEQ ID NO: 84984 - protein, 5 aa, Artificial Sequence
  Example of Bioactive carrier-affinity-contaning group
WWFWG

SEQ ID NO: 84985 - protein, 12 aa, Artificial Sequence
  Building block peptide "PEP"
  MOD_RES (6), (7): Xaa is C or S
ASAAPXXSRVAL

SEQ ID NO: 84986 - protein, 12 aa, Artificial Sequence
  Building block peptide "PEP"
  MOD_RES (6), (7): Xaa is C or S
ASAAPXXTQVAL

SEQ ID NO: 84987 - protein, 12 aa, Artificial Sequence
  Building block peptide "PEP"
  MOD_RES (6), (7): Xaa is C or S
ASASPXXSRVDL

SEQ ID NO: 84988 - protein, 12 aa, Artificial Sequence
  Building block peptide "PEP"
  MOD_RES (6), (7): Xaa is C or S
GIPEPXXSRVKM

SEQ ID NO: 84989 - protein, 12 aa, Artificial Sequence
  Building block peptide "PEP"
  MOD_RES (6), (7): Xaa is C or S
GIPEPXXTQVKM

SEQ ID NO: 84990 - protein, 12 aa, Artificial Sequence
  Building block peptide "PEP"
  MOD_RES (6), (7): Xaa is C or S
GSAGPXXSRVKM

SEQ ID NO: 84991 - protein, 12 aa, Artificial Sequence
  Building block peptide "PEP"
  MOD_RES (6), (7): Xaa is C or S
GSAGPXXTQVKM

SEQ ID NO: 84992 - protein, 12 aa, Artificial Sequence
  Building block peptide "PEP"
  MOD_RES (6), (7): Xaa is C or S
HVPKPXXSRVKL

SEQ ID NO: 84993 - protein, 12 aa, Artificial Sequence
  Building block peptide "PEP"
  MOD_RES (6), (7): Xaa is C or S
HVPKPXXTQVKL

SEQ ID NO: 84994 - protein, 12 aa, Artificial Sequence
  Building block peptide "PEP"
  MOD_RES (6), (7): Xaa is C or S
TVPKPXXSRVQL

SEQ ID NO: 84995 - protein, 12 aa, Artificial Sequence
  Building block peptide "PEP"
  MOD_RES (6), (7): Xaa is C or S
TVPKPXXTQVQL

SEQ ID NO: 84996 - protein, 12 aa, Artificial Sequence
  Building block peptide "PEP"
  MOD_RES (6), (7): Xaa is C or S
YVPKPXXSRVKL

SEQ ID NO: 84997 - protein, 12 aa, Artificial Sequence
  Building block peptide "PEP"
  MOD_RES (6), (7): Xaa is C or S
YVPKPXXTQVKL

SEQ ID NO: 84998 - protein, 12 aa, Artificial Sequence
  Building block peptide "PEP"
HVTKPTSTQVKL

SEQ ID NO: 84999 - protein, 4 aa, Artificial Sequence
  Building block peptide "PEP"
SIAN

SEQ ID NO: 85000 - protein, 4 aa, Artificial Sequence
  Building block peptide "PEP"
SIAS

SEQ ID NO: 85001 - protein, 4 aa, Artificial Sequence
  Building block peptide "PEP"
NIPS

SEQ ID NO: 85002 - protein, 12 aa, Artificial Sequence
  Building block peptide "PEP"
ASASPSSVSQDL

SEQ ID NO: 85003 - protein, 12 aa, Artificial Sequence
  Building block peptide "PEP"
KIPKASSVSQEL

SEQ ID NO: 85004 - protein, 12 aa, Artificial Sequence
  Building block peptide "PEP"
GIPEPSSVSQKM

SEQ ID NO: 85005 - protein, 12 aa, Artificial Sequence
  Building block peptide "PEP"
SIPKASSVSQEL

SEQ ID NO: 85006 - protein, 12 aa, Artificial Sequence
  Building block peptide "PEP"
YVPKPSSVSQKL

SEQ ID NO: 85007 - protein, 12 aa, Artificial Sequence
  Building block peptide "PEP"
TVPKPSSVSQQL

SEQ ID NO: 85008 - protein, 12 aa, Artificial Sequence
  Building block peptide "PEP"
AVPKASSVSQKL

SEQ ID NO: 85009 - protein, 12 aa, Artificial Sequence
  Building block peptide "PEP"
KVGKASSVSQKL

SEQ ID NO: 85010 - protein, 12 aa, Artificial Sequence
  Building block peptide "PEP"
KASKASSVSQKL

SEQ ID NO: 85011 - protein, 12 aa, Artificial Sequence
  Building block peptide "PEP"
GSAGPSSVSQKM

SEQ ID NO: 85012 - protein, 12 aa, Artificial Sequence
  Building block peptide "PEP"
AAPASSSVSQRL

SEQ ID NO: 85013 - protein, 12 aa, Artificial Sequence
  Building block peptide "PEP"
STPPTSSVSQRL

SEQ ID NO: 85014 - protein, 12 aa, Artificial Sequence
  Building block peptide "PEP"
HVPKPSSVSQKL

SEQ ID NO: 85015 - protein, 12 aa, Artificial Sequence
  Building block peptide "PEP"
RVPSTSSVSQKT

SEQ ID NO: 85016 - protein, 12 aa, Artificial Sequence
  Building block peptide "PEP"
ASAAPSSVSQAL

SEQ ID NO: 85017 - protein, 12 aa, Artificial Sequence
  Building block peptide "PEP"
HVTKPTSSRVKL

SEQ ID NO: 85018 - protein, 12 aa, Artificial Sequence
  Building block peptide "PEP"
HVTKPTSTPTKL

SEQ ID NO: 85019 - protein, 7 aa, Artificial Sequence
  Building block peptide "PEP"
  MOD_RES (6), (6): Xaa is C or S
NDEGLXS

SEQ ID NO: 85020 - protein, 40 aa, Artificial Sequence
  Examplary primary structure supporting PEPREF 3D coordinates
KIPKACCVPTELSAISMLYLDENEKVLKNYQDMVVEGCGC

SEQ ID NO: 85021 - DNA, 22 bp, Artificial Sequence
  PCR Primer
aagctaccactgataactcgcc

SEQ ID NO: 85022 - DNA, 22 bp, Artificial Sequence
  PCR Primer
cttctttaccctcatcctgtcg

SEQ ID NO: 85023 - DNA, 20 bp, Artificial Sequence
  PCR Primer
cactgttaccgccacttccc

SEQ ID NO: 85024 - DNA, 20 bp, Artificial Sequence
  PCR Primer
accagcggaagtccccttcg

SEQ ID NO: 85025 - DNA, 20 bp, Artificial Sequence
  PCR Primer
gctctgtggcatacaggaga

SEQ ID NO: 85026 - DNA, 20 bp, Artificial Sequence
  PCR Primer
catagaatcgcaccctgatg

SEQ ID NO: 85027 - DNA, 20 bp, Artificial Sequence
  PCR Primer
gacgtgcccaggcgtatttc

SEQ ID NO: 85028 - DNA, 20 bp, Artificial Sequence
  PCR Primer
aagtctggggtccgtcaagg

SEQ ID NO: 85029 - DNA, 20 bp, Artificial Sequence
  PCR Primer
gcagtacagccccaaaatgg

SEQ ID NO: 85030 - DNA, 22 bp, Artificial Sequence
  PCR Primer
acaaagtccggcctgtatccaa
